(19) United States
(12) Patent Application Publication
(10) Pub. No.: US 2023/0140953 A1
(43) Pub. Date: May 11, 2023

(54) METHODS OF EDITING A DISEASE-ASSOCIATED GENE USING ADENOSINE DEAMINASE BASE EDITORS, INCLUDING FOR THE TREATMENT OF GENETIC DISEASE

(71) Applicant: BEAM THERAPEUTICS INC., Cambridge, MA (US)

(72) Inventors: Ian SLAYMAKER, Cambridge, MA (US); Nicole GAUDELLI, Cambridge, MA (US); Yi YU, Cambridge, MA (US); Bernd ZETSCHE, Cambridge, MA (US); David A. BORN, Cambridge, MA (US); Seung-Joo LEE, Cambridge, MA (US); Michael PACKER, Cambridge, MA (US); Jason Michael GEHRKE, Cambridge, MA (US); Natalie PETROSSIAN, Cambridge, MA (US); Angelica MESSANA, Cambridge, MA (US); Shaunna BERKOVITCH, Cambridge, MA (US)

(73) Assignee: BEAM THERAPEUTICS INC., Cambridge, MA (US)

(21) Appl. No.: 17/430,672

(22) PCT Filed: Feb. 13, 2020
(86) PCT No.: PCT/US20/18073

§ 371 Date: Aug. 12, 2021

Related U.S. Application Data
(60) Provisional application No. 62/805,271, filed on Feb. 13, 2019.
(60) Provisional application No. 62/850,919, filed on May 21, 2019.
(60) Provisional application No. 62/852,228, filed on May 23, 2019.
(60) Provisional application No. 62/852,224, filed on May 23, 2019.
(60) Provisional application No. 62/873,138, filed on Jul. 11, 2019.
(60) Provisional application No. 62/888,867, filed on Aug. 19, 2019.
(60) Provisional application No. 62/931,722, filed on Nov. 6, 2019.
(60) Provisional application No. 62/941,569, filed on Nov. 27, 2019.
(60) Provisional application No. 62/966,526, filed on Jan. 27, 2020.

(51) Int. Cl. A61K 38/46; C12N 15/85; C12N 15/90; C12N 15/11; C12N 9/22; C12N 9/78; A61K 38/50; A61K 31/7105; A61P 25/16; A61P 3/00; A61P 25/00

(52) U.S. Cl. CPC A61K 38/465; C12N 15/85; C12N 15/907; C12N 15/11; C12N 9/22; C12N 9/78; C12Y 305/04004; A61K 38/50; A61K 31/7105; A61P 25/16; A61P 3/00; A61P 25/00; C12N 2310/20; C12N 2800/80; C12N 2800/107

(57) ABSTRACT

The invention provides compositions comprising novel programmable adenosine base editor systems (e.g., ABE8) that provide methods of treating a disease or disorder, (e.g., Parkinson's disease, Hurler syndrome, Rett syndrome, or Stargardt disease) in a subject by administering to the subject a programmable adenosine base editor system (e.g., ABE8) that have increased efficiency and methods of using these adenosine deaminase variants for editing a disease-associated gene.

### CROSS-REFERENCE TO RELATED APPLICATIONS

[0001] This application is the U.S. national phase application, pursuant to 35 U.S.C. § 371, of PCT International Application No. PCT/US2020/018073, filed Feb. 13, 2020, which claims the benefit of U.S. Provisional Application No. 62/805,271 filed Feb. 13, 2019; U.S. Provisional Application No. 62/850,919, filed May 21, 2019; U.S. Provisional Application No. 62/852,228 filed May 23, 2019; U.S. Provisional Application No. 62/852,224 filed May 23, 2019; U.S. Provisional Application No. 62/873,138 filed Jul. 11, 2019; U.S. Provisional Application No. 62/888,867 filed Aug. 19, 2019; U.S. Provisional Application No. 62/931,722 filed Nov. 6, 2019; U.S. Provisional Application No. 62/941,569 filed Nov. 27, 2019; U.S. Provisional Application No. 62/966,526 filed Jan. 27, 2020, the disclosures of which are hereby incorporated by reference in their entirety.

### SEQUENCE LISTING

[0002] The instant application contains a Sequence Listing which has been submitted electronically in ASCII format and is hereby incorporated by reference in its entirety. Said ASCII copy, created on Mar. 29, 2020, is named 52885-802_601_SL.txt and is 1,885,037 bytes in size.

### INCORPORATION BY REFERENCE

[0003] All publications, patents, and patent applications mentioned in this specification are herein incorporated by reference to the same extent as if each individual publication, patent, or patent application was specifically and individually indicated to be incorporated by reference. Absent any indication otherwise, publications, patents, and patent applications mentioned in this specification are incorporated herein by reference in their entireties.

### BACKGROUND OF THE DISCLOSURE

[0004] Targeted editing of nucleic acid sequences, for example, the targeted cleavage or the targeted modification of genomic DNA is a highly promising approach for the study of gene function and also has the potential to provide new therapies for human genetic diseases. Currently available base editors include cytidine base editors (e.g., BE4) that convert target C•G base pairs to T•A and adenine base editors (e.g., ABE7.10) that convert A•T to G•C. There is a need in the art for improved base editors capable of inducing modifications within a target sequence with greater specificity and efficiency.

### SUMMARY OF THE DISCLOSURE

[0005] The invention provides compositions comprising novel adenine base editors (e.g., ABE8) that have increased efficiency and methods of using base editors comprising adenosine deaminase variants for editing a target sequence.

[0006] In some aspects, provided herein, is a method of treating a neurological disorder in a subject, the method comprising: administering to the subject (i) an adenosine base editor or a nucleic acid sequence encoding the adenosine base editor and (ii) a guide polynucleotide or a nucleic acid sequence encoding the guide polynucleotide, wherein the adenosine base editor comprises a programmable DNA binding domain and an adenosine deaminase domain, wherein the adenosine deaminase domain comprises an amino acid substitution at amino acid position 82 or 166 as numbered in SEQ ID NO: 2 or a corresponding position thereof, and wherein the guide polynucleotide directs the adenosine base editor to effect an A-to-G nucleobase alteration in a target gene or a regulatory element thereof associated with the neurological disorder in the subject, thereby treating the neurological disorder in the subject. In another embodiment of this aspect, the target gene is an alpha-L-iduronidase (IDUA) gene and the neurological disease is Hurler syndrome. In one embodiment of this aspect, the target gene is a leucine-rich repeat kinase-2 (LRRK2) gene and the neurological disease is Parkinson's disease. In one embodiment of this aspect, the target gene is a methyl CpG binding protein 2 (MECP2) gene and the neurological disease is Rett syndrome. In another embodiment of this aspect, the target gene is an ATP-binding cassette subfamily member 4 (ABCA4) gene and the neurological disease is Stargardt disease.

[0007] In some aspects, provided herein, is a method of treating Hurler syndrome in a subject, the method comprising administering to the subject (i) an adenosine base editor or a nucleic acid sequence encoding the adenosine base editor and (ii) a guide polynucleotide or a nucleic acid sequence encoding the guide polynucleotide, wherein the adenosine base editor comprises a programmable DNA binding domain and an adenosine deaminase domain, wherein the adenosine deaminase domain comprises an amino acid substitution at amino acid position 82 or 166 as numbered in SEQ ID NO: 2 or a corresponding position thereof, and wherein the guide polynucleotide directs the adenosine base editor to effect an A-to-G nucleobase alteration in an alpha-L-iduronidase (IDUA) gene or a regulatory element thereof in the subject, thereby treating Hurler syndrome in the subject.

[0008] In some embodiments, the administration ameliorates at least one symptom related to Hurler syndrome. In some embodiments, the administration results in faster amelioration of at least one symptom related to Hurler syndrome as compared to treatment with a base editor without the amino acid substitution in the adenosine deaminase.

[0009] In some embodiments, the IDUA gene or regulatory element thereof comprises a SNP associated with Hurler syndrome. In some embodiments, the A-to-G nucleobase alteration is at the SNP associated with Hurler syndrome. In some embodiments, the SNP associated with Hurler syndrome results in a W402X or a W401X amino acid mutation in an IDUA polypeptide as numbered in SEQ ID NO: 4, or a variant thereof, encoded by the IDUA gene, wherein X is a stop codon. In some embodiments, the A-to-G nucleobase alteration changes the SNP associated with Hurler syndrome to a wild type nucleobase. In some embodiments, the A-to-G nucleobase alteration changes the SNP associated with Hurler syndrome to a non-wild type nucleobase that results in one or more ameliorated symptoms of Hurler syndrome. In some embodiments, the A-to-G alteration at the SNP associated with Hurler Syndrome changes a stop codon to a tryptophan in an IDUA polypeptide encoded by the IDUA gene.

[0010] In some embodiments, the guide polynucleotide comprises a nucleic acid sequence complementary to the IDUA gene or regulatory element thereof comprising the SNP associated with Hurler syndrome. In some embodiments, the adenosine base editor is in complex with a single guide RNA (sgRNA) comprising a nucleic acid sequence complementary to the IDUA gene or regulatory element thereof comprising the SNP associated with Hurler syndrome. In some embodiments, the sgRNA comprises a nucleic acid sequence selected from the group consisting of: 5′-GACUCUAGGCAGAGGUCUCAA-3′ (SEQ ID NO: 7), 5′-ACUCUAGGCAGAGGUCUCAA-3′ (SEQ ID NO: 8), 5′-CUCUAGGCCGAAGUGUCGC-3′ (SEQ ID NO: 9), and 5′-GCUCUAGGCCGAAGUGUCGC-3′ (SEQ ID NO: 10).

[0011] In some aspects, provided herein, is a method of treating Parkinson's disease in a subject, the method comprising: administering to the subject (i) an adenosine base editor or a nucleic acid sequence encoding the adenosine base editor and (ii) a guide polynucleotide or a nucleic acid sequence encoding the guide polynucleotide, wherein the adenosine base editor comprises a programmable DNA binding domain and an adenosine deaminase domain, wherein the adenosine deaminase domain comprises an amino acid substitution at amino acid position 82 or 166 as numbered in SEQ ID NO: 2 or a corresponding position thereof, and wherein the guide polynucleotide directs the adenosine base editor to effect an A-to-G nucleobase alteration a leucine-rich repeat kinase-2 (LRRK2) gene or a regulatory element thereof in the subject, thereby treating Parkinson's disease in the subject.

[0012] In some embodiments, the administration ameliorates at least one symptom related to Parkinson's disease. In some embodiments, the administration results in faster amelioration of at least one symptom related to Parkinson's disease as compared to treatment with a base editor without the amino acid substitution in the adenosine deaminase.

[0013] In some embodiments, the LRRK2 gene or regulatory element thereof comprises a SNP associated with Parkinson's disease. In some embodiments, the A-to-G nucleobase alteration is at the SNP associated with Parkinson's disease. In some embodiments, the SNP associated with Parkinson Disease results in a A419V, a R1441C, a R1441H, or a G2019S amino acid mutation in a LRRK2 polypeptide as numbered in SEQ ID NO: 3, or a variant thereof, encoded by the LRRK2 gene.

[0014] In some embodiments, the A-to-G nucleobase alteration changes the SNP associated with Parkinson's disease to a wild type nucleobase. In some embodiments, the A-to-G nucleobase alteration changes the SNP associated with Parkinson's disease to a non-wild type nucleobase that results in one or more ameliorated symptoms of Parkinson's disease. In some embodiments, the A-to-G nucleobase alteration changes a Cysteine or Histidine to an Arginine in a LRRK2 polypeptide encoded by the LRRK2 gene. In some embodiments, the A-to-G alteration changes a Serine to a Glycine in a LRRK2 polypeptide encoded by the LRRK2 gene. In some embodiments, the A-to-G alteration replaces the Cysteine (C) or Histidine (H) with an Arginine (R) at position 144 or replaces the Serine with a Glycine (G) at position 2019 of a LRRK2 polypeptide as numbered in SEQ ID NO: 3, or a variant thereof, encoded by the LRRK2 gene.

[0015] In some aspects, provided herein, is a method of treating Parkinson's disease in a subject, the method comprising: administering to the subject (i) an adenosine base editor or a nucleic acid sequence encoding the adenosine base editor and (ii) a guide polynucleotide or a nucleic acid sequence encoding the guide polynucleotide, wherein the adenosine base editor comprises a programmable DNA binding domain and an adenosine deaminase domain, and wherein the guide polynucleotide directs the adenosine base editor to effect an A-to-G nucleobase alteration at a SNP in a LRRK2 gene associated with Parkinson's disease, wherein the SNP does not encode a G2019S mutation in a LRRK2 polypeptide as numbered in SEQ ID NO: 3, or a variant thereof.

[0016] In some embodiments, the adenosine deaminase domain comprises an amino acid substitution at amino acid position 82 or 166 as numbered in SEQ ID NO: 2 or a corresponding position thereof. In some embodiments, the guide polynucleotide comprises a nucleic acid sequence complementary to the LRRK2 gene or regulatory element thereof comprising the SNP associated with Parkinson's Disease. In some embodiments, the adenosine base editor is in complex with a single guide RNA (sgRNA) comprising a nucleic acid sequence complementary to the LRRK2 gene or regulatory element thereof comprising the SNP associated with Parkinson Disease. In some embodiments, the sgRNA comprises a nucleic acid sequence: 5′-AAGCGCAAGCCUGGAGGGAA-3′ (SEQ ID NO: 11); or 5′-ACUACAGCAUUGCUCAGUAC-3′ (SEQ ID NO: 12).

[0017] In some aspects, provided herein, is a method of treating Rett syndrome in a subject, the method comprising administering to the subject (i) an adenosine base editor or a nucleic acid sequence encoding the adenosine base editor and (ii) a guide polynucleotide or a nucleic acid sequence encoding the guide polynucleotide, wherein the adenosine base editor comprises a programmable DNA binding domain and an adenosine deaminase domain, wherein the adenosine deaminase domain comprises an amino acid substitution at amino acid position 82 or 166 as numbered in SEQ ID NO: 2 or a corresponding position thereof, and wherein the guide polynucleotide directs the adenosine base editor to effect an A-to-G nucleobase alteration in a methyl CpG binding protein 2 (MECP2) gene or a regulatory element thereof in the subject, thereby treating Rett syndrome in the subject.

[0018] In some embodiments, the administration ameliorates at least one symptom related to Rett syndrome. In some embodiments, the administration results in faster amelioration of at least one symptom related to Rett syndrome as compared to treatment with a base editor without the amino acid substitution in the adenosine deaminase. In some embodiments, the MECP2 gene or regulatory element thereof comprises a SNP associated with Rett syndrome. In some embodiments, the A-to-G nucleobase alteration is at the SNP associated with Rett Syndrome. In some embodiments, the SNP associated with Rett syndrome results in a R106W or a T158M amino acid mutation in a MECP2 polypeptide as numbered in SEQ ID NO: 5, or a variant thereof, encoded by the MECP2 gene. In some embodiments, the SNP associated with Rett syndrome results in a R255X or a R270X amino acid mutation in a MECP2 polypeptide encoded by the MECP2 gene, wherein X is a stop codon.

[0019] In some embodiments, the A-to-G nucleobase alteration changes the SNP associated with Rett syndrome to a wild type nucleobase. In some embodiments, the A-to-G nucleobase alteration changes the SNP associated with Rett syndrome to a non-wild type nucleobase that results in ameliorated Rett syndrome symptoms. In some embodiments, the A-to-G nucleobase alteration at the SNP associated with Rett Syndrome changes a stop codon to tryptophan in MECP2 polypeptide.

[0020] In some embodiments, the guide polynucleotide comprises a nucleic acid sequence complementary to the MECP2 gene or regulatory element thereof comprising the SNP associated with Rett syndrome. In some embodiments, the adenosine base editor is in complex with a single guide RNA (sgRNA) comprising a nucleic acid sequence complementary to the MECP2 gene or regulatory element thereof comprising the SNP associated with Rett syndrome. In some embodiments, the guide polynucleotide comprises a nucleic acid sequence selected from the group consisting of: 5′-CUUUUCACUUCCUGCCGGGG-3′ (SEQ ID NO: 13), 5′-AGCUUCCAUGUCCAGCCUUC-3′ (SEQ ID NO: 14), 5′-ACCAUGAAGUCAAAAUCAUU-3′ (SEQ ID NO: 15), and 5′-GCUUUCAGCCCCGUUUCUUG-3′ (SEQ ID NO: 16).

[0021] In some aspects, provided herein, is a method of treating Stargardt disease in a subject, the method comprising administering to the subject (i) an adenosine base editor or a nucleic acid sequence encoding the adenosine base editor and (ii) a guide polynucleotide or a nucleic acid sequence encoding the guide polynucleotide, wherein the adenosine base editor comprises a programmable DNA binding domain and an adenosine deaminase domain, wherein the adenosine deaminase domain comprises an amino acid substitution at amino acid position 82 or 166 as numbered in SEQ ID NO: 2 or a corresponding position thereof, and wherein the guide polynucleotide directs the adenosine base editor to effect an A-to-G nucleobase alteration in an ATP-binding cassette subfamily member 4 (ABCA4) gene or a regulatory element thereof in the subject, thereby treating Stargardt disease in the subject.

[0022] In some embodiments, the administration ameliorates at least one symptom related to Stargardt disease. In some embodiments, the administration results in faster amelioration of at least one symptom related to Stargardt disease as compared to treatment with a base editor without the amino acid substitution in the adenosine deaminase.

[0023] In some embodiments, the ABCA4 gene comprises a SNP associated with Stargardt disease. In some embodiments, the A-to-G nucleobase alteration is at the SNP associated with Stargardt disease. In some embodiments, the SNP associated with Stargardt disease results in a A1038V or a G1961E amino acid mutation in an ABCA4 polypeptide as numbered in SEQ ID NO: 6, or a variant thereof, encoded by the ABCA4 gene. In some embodiments, the SNP associated with Stargardt disease results in a G1961E amino acid mutation in the ABCA4 polypeptide as numbered in SEQ ID NO: 6, or a variant thereof.

[0024] In some embodiments, the A-to-G nucleobase alteration changes the SNP associated with Stargardt disease to a wild type nucleobase. In some embodiments, the A-to-G nucleobase alteration changes the SNP associated with Stargardt disease to a non-wild type nucleobase that results in one or more ameliorated symptoms of Stargardt disease. In some embodiments, the guide polynucleotide comprises a nucleic acid sequence complementary to the ABCA4 gene or regulatory element thereof comprising the SNP associated with Stargardt disease.

[0025] In some embodiments, the adenosine base editor is in complex with a single guide RNA (sgRNA) comprising a nucleic acid sequence complementary to the ABCA4 gene or regulatory element thereof comprising the SNP associated with Stargardt Disease. In some embodiments, the sgRNA comprises the sequence 5′-CUCCAGGGCGAACUUCGACACACAGC-3′ (SEQ ID NO: 17).

[0026] In various aspects, the treatment described herein results in ameliorated symptoms of the neurological disorder compared to treatment with a base editor comprising an adenosine deaminase domain without the amino acid substitutions.

[0027] In some aspects, provided herein, is a method of editing a target gene or regulatory element thereof associated with a neurological disorder, the method comprising contacting the target gene or regulatory element thereof with (i) an adenosine base editor and (ii) a guide polynucleotide, wherein the adenosine base editor comprises a programmable DNA binding domain and an adenosine deaminase domain, wherein the adenosine deaminase domain comprises an amino acid substitution at amino acid position 82 or 166 as numbered in SEQ ID NO: 2 or a corresponding position thereof, wherein the guide polynucleotide directs the adenosine base editor to effect an A-to-G nucleobase alteration in a target gene or a regulatory element thereof associated with the neurological disorder. In one embodiment of this aspect, the target gene is a leucine-rich repeat kinase-2 (LRRK2) gene and the neurological disease is Parkinson's disease. In another embodiment of this aspect, the target gene is an alpha-L-iduronidase (IDUA) gene and the neurological disease is Hurler syndrome. In one embodiment of this aspect, the target gene is a methyl CpG binding protein 2 (MECP2) gene and the neurological disease is Rett syndrome. In another embodiment of this aspect, the target gene is an ATP-binding cassette subfamily member 4 (ABCA4) gene and the neurological disease is Stargardt disease.

[0028] In some aspects, provided herein, is a method of editing a leucine-rich repeat kinase-2 (LRRK2) gene or a regulatory element thereof, the method comprising contacting the LRRK2 gene or regulatory element thereof with (i) an adenosine base editor or a nucleic acid sequence encoding the adenosine base editor and (ii) a guide polynucleotide or a nucleic acid sequence encoding the guide polynucleotide, wherein the adenosine base editor comprises a programmable DNA binding domain and an adenosine deaminase domain, wherein the adenosine deaminase domain comprises an amino acid substitution at amino acid position 82 or 166 as numbered in SEQ ID NO: 2 or a corresponding position thereof, and wherein the guide polynucleotide directs the adenosine base editor to effect an A-to-G nucleobase alteration in the LRRK2 gene a regulatory element thereof.

[0029] In some embodiments, the A-to-G nucleobase alteration is at the SNP associated with Parkinson's disease. In some embodiments, the SNP associated with Parkinson Disease results in a A419V, a R1441C, a R1441H, or a G2019S amino acid mutation in a LRRK2 polypeptide as numbered in SEQ ID NO: 3, or a variant thereof, encoded by the LRRK2 gene. In some embodiments, the A-to-G nucleobase alteration changes the SNP associated with Parkinson's disease to a wild type nucleobase. In some embodiments, the A-to-G nucleobase alteration changes the SNP associated with Parkinson's disease to a non-wild type nucleobase that results in one or more ameliorated symptoms of Parkinson's disease.

[0030] In some embodiments, the A-to-G nucleobase alteration changes a Cysteine or Histidine to an Arginine in a LRRK2 polypeptide encoded by the LRRK2 gene. In some embodiments, the A-to-G alteration changes a Serine to a Glycine in a LRRK2 polypeptide encoded by the LRRK2 gene. In some embodiments, the A-to-G alteration replaces the Cysteine (C) or Histidine (H) with an Arginine (R) at position 144 or replaces the Serine with a Glycine (G) at position 2019 of a LRRK2 polypeptide as numbered in SEQ ID NO: 3, or a variant thereof, encoded by the LRRK2 gene.

[0031] In some aspects, provided herein, is a method of editing a leucine-rich repeat kinase-2 (LRRK2) gene or a regulatory element thereof, the method comprising contacting the LRRK2 gene or regulatory element thereof with (i) an adenosine base editor or a nucleic acid sequence encoding the adenosine base editor and (ii) a guide polynucleotide or a nucleic acid sequence encoding the guide polynucleotide, wherein the adenosine base editor comprises a programmable DNA binding domain and an adenosine deaminase domain, and wherein the guide polynucleotide directs the adenosine base editor to effect an A-to-G nucleobase alteration at a SNP in a LRRK2 gene, wherein the SNP does not encode a G2019S mutation in a LRRK2 polypeptide as numbered in SEQ ID NO: 3, or a variant thereof.

[0032] In some embodiments, the adenosine deaminase domain comprises an amino acid substitution at amino acid position 82 or 166 as numbered in SEQ ID NO: 2 or a corresponding position thereof. In some embodiments, the guide polynucleotide comprises a nucleic acid sequence complementary to the LRRK2 gene or regulatory element thereof comprising the SNP associated with Parkinson's Disease.

[0033] In some embodiments, the adenosine base editor is in complex with a single guide RNA (sgRNA) comprising a nucleic acid sequence complementary to the LRRK2 gene or regulatory element thereof comprising the SNP associated with Parkinson Disease. In some embodiments, the sgRNA comprises a nucleic acid sequence: 5′-AAGCGCAAGCCUGGAGGGAA-3′ (SEQ ID NO: 11); or 5′-ACUACAGCAUUGCUCAGUAC-3′ (SEQ ID NO: 12).

[0034] In some aspects, provided herein, is a method of editing an alpha-L-iduronidase (IDUA) gene or a regulatory element thereof, the method comprising contacting the IDUA gene or regulatory element thereof with (i) an adenosine base editor or a nucleic acid sequence encoding the adenosine base editor and (ii) a guide polynucleotide or a nucleic acid sequence encoding the guide polynucleotide, wherein the adenosine base editor comprises a programmable DNA binding domain and an adenosine deaminase domain, wherein the adenosine deaminase domain comprises an amino acid substitution at amino acid position 82 or 166 as numbered in SEQ ID NO: 2 or a corresponding position thereof, and wherein the guide polynucleotide directs the adenosine base editor to effect an A-to-G nucleobase alteration in the IDUA gene or a regulatory element thereof.

[0035] In some embodiments, the IDUA gene or regulatory element thereof comprises a SNP associated with Hurler syndrome. In some embodiments, the A-to-G nucleobase alteration is at the SNP associated with Hurler syndrome. In some embodiments, the SNP associated with Hurler syndrome results in a W402X or a W401X amino acid mutation in an IDUA polypeptide as numbered in SEQ ID NO: 4, or a variant thereof, encoded by the IDUA gene, wherein X is a stop codon.

[0036] In some embodiments, the A-to-G nucleobase alteration changes the SNP associated with Hurler syndrome to a wild type nucleobase. In some embodiments, the A-to-G nucleobase alteration changes the SNP associated with Hurler syndrome to a non-wild type nucleobase that results in one or more ameliorated symptoms of Hurler syndrome. In some embodiments, the A-to-G alteration at the SNP associated with Hurler Syndrome changes a stop codon to a tryptophan in an IDUA polypeptide encoded by the IDUA gene.

[0037] In some embodiments, the guide polynucleotide comprises a nucleic acid sequence complementary to the IDUA gene or regulatory element thereof comprising the SNP associated with Hurler syndrome. In some embodiments, the adenosine base editor is in complex with a single guide RNA (sgRNA) comprising a nucleic acid sequence complementary to the IDUA gene or regulatory element thereof comprising the SNP associated with Hurler syndrome. In some embodiments, the sgRNA comprises a nucleic acid sequence selected from the group consisting of: 5′-GACUCUAGGCAGAGGUCUCAA-3′ (SEQ ID NO: 7), 5′-ACUCUAGGCAGAGGUCUCAA-3′ (SEQ ID NO: 8), 5′-CUCUAGGCCGAAGUGUCGC-3′ (SEQ ID NO: 9), and 5′-GCUCUAGGCCGAAGUGUCGC-3′ (SEQ ID NO: 10).

[0038] In some aspects, provided herein, is a method of editing a methyl CpG binding protein 2 (MECP2) gene or regulatory element thereof, the method comprising administering to the subject (i) an adenosine base editor or a nucleic acid sequence encoding the adenosine base editor and (ii) a guide polynucleotide or a nucleic acid sequence encoding the guide polynucleotide, wherein the adenosine base editor comprises a programmable DNA binding domain and an adenosine deaminase domain, wherein the adenosine deaminase domain comprises an amino acid substitution at amino acid position 82 or 166 as numbered in SEQ ID NO: 2 or a corresponding position thereof, and wherein the guide polynucleotide directs the adenosine base editor to effect an A-to-G nucleobase alteration in the MECP2 gene or a regulatory element thereof.

[0039] In some embodiments, the MECP2 gene or regulatory element thereof comprises a SNP associated with Rett syndrome. In some embodiments, the A-to-G nucleobase alteration is at the SNP associated with Rett Syndrome. In some embodiments, the SNP associated with Rett syndrome results in a R106W or a T158M amino acid mutation in a MECP2 polypeptide as numbered in SEQ ID NO: 5, or a variant thereof, encoded by the MECP2 gene. In some embodiments, the SNP associated with Rett syndrome results in a R255X or a R270X amino acid mutation in a MECP2 polypeptide encoded by the MECP2 gene, wherein X is a stop codon.

[0040] In some embodiments, the A-to-G nucleobase alteration changes the SNP associated with Rett syndrome to a wild type nucleobase. In some embodiments, the A-to-G nucleobase alteration changes the SNP associated with Rett syndrome to a non-wild type nucleobase that results in one or more ameliorated symptoms of Rett syndrome. In some embodiments, the A-to-G nucleobase alteration at the SNP associated with Rett Syndrome changes a stop codon to tryptophan in MECP2 polypeptide.

[0041] In some embodiments, the guide polynucleotide comprises a nucleic acid sequence complementary to the MECP2 gene or regulatory element thereof comprising the SNP associated with Rett syndrome. In some embodiments, the adenosine base editor is in complex with a single guide RNA (sgRNA) comprising a nucleic acid sequence complementary to the MECP2 gene or regulatory element thereof comprising the SNP associated with Rett syndrome. In some embodiments, the guide polynucleotide comprises a nucleic acid sequence selected from the group consisting of: 5′-CUUUUCACUUCCUGCCGGGG-3′ (SEQ ID NO: 13), 5′-AGCUUCCAUGUCCAGCCUUC-3′ (SEQ ID NO: 14), 5′-ACCAUGAAGUCAAAAUCAUU-3′ (SEQ ID NO: 15), and 5′-GCUUUCAGCCCCGUUUCUUG-3′ (SEQ ID NO: 16).

[0042] In some aspects, provided herein, is a method of editing an ATP binding cassette subfamily member 4 (ABCA4) gene or regulatory element thereof, the method comprising contacting the ABCA4 gene or regulatory element thereof with (i) an adenosine base editor or a nucleic acid sequence encoding the adenosine base editor and (ii) a guide polynucleotide or a nucleic acid sequence encoding the guide polynucleotide, wherein the adenosine base editor comprises a programmable DNA binding domain and an adenosine deaminase domain, wherein the adenosine deaminase domain comprises an amino acid substitution at amino acid position 82 or 166 as numbered in SEQ ID NO: 2 or a corresponding position thereof, and wherein the guide polynucleotide directs the adenosine base editor to effect an A-to-G nucleobase alteration in the ABCA4 gene or a regulatory element thereof.

[0043] In some embodiments, the administration ameliorates at least one symptom related to Stargardt disease. In some embodiments, the administration results in faster amelioration of at least one symptom related to Stargardt disease as compared to treatment with a base editor without the amino acid substitution in the adenosine deaminase.

[0044] In some embodiments, the ABCA4 gene comprises a SNP associated with Stargardt disease. In some embodiments, the A-to-G nucleobase alteration is at the SNP associated with Stargardt disease. In some embodiments, the SNP associated with Stargardt disease results in a A1038V, or a G1961E amino acid mutation in an ABCA4 polypeptide as numbered in SEQ ID NO: 6, or a variant thereof, encoded by the ABCA4 gene. In some embodiments, the SNP associated with Stargardt disease results in a G1961E amino acid mutation in the ABCA4 polypeptide as numbered in SEQ ID NO: 6, or a variant thereof.

[0045] In some embodiments, the A-to-G nucleobase alteration changes the SNP associated with Stargardt disease to a wild type nucleobase. In some embodiments, the A-to-G nucleobase alteration changes the SNP associated with Stargardt disease to a non-wild type nucleobase that results in one or more ameliorated symptoms of Stargardt disease. In some embodiments, the guide polynucleotide comprises a nucleic acid sequence complementary to the ABCA4 gene or regulatory element thereof comprising the SNP associated with Stargardt Disease.

[0046] In some embodiments, the adenosine base editor is in complex with a single guide RNA (sgRNA) comprising a nucleic acid sequence complementary to the ABCA4 gene or regulatory element thereof comprising the SNP associated with Stargardt Disease. In some embodiments, the sgRNA comprises the sequence 5′-CUCCAGGGCGAACUUCGACACACAGC-3′ (SEQ ID NO: 17).

[0047] In various embodiments of the above aspects, the contacting is in a cell. In some embodiments, the contacting results in less than 10% indels in a genome in the cell, wherein indel rate is measured by mismatch frequency between sequences flanking the single nucleotide modification and an unmodified sequence. In some embodiments, the contacting results in less than 5% indels in a genome in the cell, wherein indel rate is measured by mismatch frequency between sequences flanking the single nucleotide modification and an unmodified sequence. In some embodiments, the contacting results in less than 1% indels in a genome in the cell, wherein indel rate is measured by mismatch frequency between sequences flanking the single nucleotide modification and an unmodified sequence.

[0048] In various embodiments of the above aspects, the cell is a neuron. In some embodiments, the contacting is in a population of cells. In some embodiments, the contacting results in the A-to-G nucleobase alteration in at least 40% of the population of cells after the contacting step. In some embodiments, the contacting results in the A-to-G nucleobase alteration in at least 50% of the population of cells after the contacting step. In some embodiments, the contacting results in the A-to-G nucleobase alteration in at least 70% of the population of cells after the contacting step. In some embodiments, at least 90% of the cells are viable after the contacting step. In some embodiments, the population of cells was not enriched after the contacting step. In some embodiments, the population of cells are neurons. In some embodiments, the contacting is in vivo or ex vivo.

[0049] In various aspects and embodiments above, the polynucleotide programmable DNA binding domain is a Cas9. In some embodiments, the Cas9 is a SpCas9, a SaCas9, or a variant thereof. In some embodiments, the polynucleotide programmable DNA binding domain comprises a modified SpCas9 having an altered protospacer-adjacent motif (PAM) specificity. In some embodiments, the Cas9 has specificity for a PAM sequence selected from the group consisting of NGG, NGA, NGCG, NGN, NNGRRT, NNNRRT, NGCG, NGCN, NGTN, and NGC; wherein N is A, G, C, or T; and wherein R is A or G. In some embodiments, the polynucleotide programmable DNA binding domain is a nuclease inactive variant. In some embodiments, the polynucleotide programmable DNA binding domain is a nickase variant. In some embodiments, the nickase variant comprises an amino acid substitution D10A or a corresponding amino acid substitution thereof. In various aspects and embodiments provided herein, the adenosine deaminase domain comprises a TadA domain. In some embodiments, the adenosine deaminase comprises a TadA deaminase comprising a V82S alteration and/or a T166R alteration.

[0050] In various aspects and embodiments above, the adenosine deaminase further comprises one or more of the following alterations: Y147T, Y147R, Q154S, Y123H, Q154R, or a combination thereof. In various aspects and embodiments provided herein, the adenosine deaminase comprises a combination of alterations selected from the group consisting of: Y147R+Q154R+Y123H; Y147R+Q154R+I76Y; Y147R+Q154R+T166R; Y147T+Q154R; Y147T+Q154S; and Y123H+Y147R+Q154R+I76Y. In various aspects and embodiments provided herein, the adenosine base editor domain comprises an adenosine deaminase monomer. In various aspects and embodiments provided herein, the adenosine base editor comprises an adenosine deaminase dimer. In some embodiments, the TadA deaminase is a TadA*8 variant. In some embodiments, the TadA*8 variant is selected from the group consisting of: TadA*8.1, TadA*8.2, TadA*8.3, TadA*8.4, TadA*8.5, TadA*8.6, TadA*8.7, TadA*8.8, TadA*8.9, TadA*8.10, TadA*8.11, TadA*8.12, and TadA*8.13. In some embodiments, the adenosine base editor is an ABE8 base editor selected from the group consisting of: ABE8.1, ABE8.2, ABE8.3, ABE8.4, ABE8.5, ABE8.6, ABE8.7, ABE8.8, ABE8.9, ABE8.10, ABE8.11, ABE8.12, and ABE8.13.

[0051] In some aspects, provided herein, is a cell produced by the method described in various aspects and embodiments disclosed herein. In some aspects, provided herein, is a population of cells produced by the method described in various aspects and embodiments disclosed herein.

[0052] In some aspects, provided herein, is a base editor system comprising (i) an adenosine base editor or a nucleic acid sequence encoding the adenosine base editor and (ii) a guide polynucleotide or a nucleic acid sequence encoding the guide polynucleotide, wherein the adenosine base editor comprises a programmable DNA binding domain and an adenosine deaminase domain, wherein the adenosine deaminase domain comprises an amino acid substitution at amino acid position 82 or 166 as numbered in SEQ ID NO: 2 or a corresponding position thereof, and wherein the guide polynucleotide directs the adenosine base editor to effect an A-to-G nucleobase alteration in a target gene or a regulatory element thereof associated with the neurological disorder. In one embodiment of the above aspect, the target gene is a leucine-rich repeat kinase-2 (LRRK2) gene and the neurological disease is Parkinson's disease. In another embodiment of this aspect, the target gene is an alpha-L-iduronidase (IDUA) gene and the neurological disease is Hurler syndrome. In one embodiment of this aspect, the target gene is a methyl CpG binding protein 2 (MECP2) gene and the neurological disease is Rett syndrome. In another embodiment of this aspect, the target gene is an ATP-binding cassette subfamily member 4 (ABCA4) gene and the neurological disease is Stargardt disease.

[0053] In some aspects, provided herein, is a base editor system comprising (i) an adenosine base editor or a nucleic acid sequence encoding the adenosine base editor and (ii) a guide polynucleotide or a nucleic acid sequence encoding the guide polynucleotide, wherein the adenosine base editor comprises a programmable DNA binding domain and an adenosine deaminase domain, wherein the adenosine deaminase domain comprises an amino acid substitution at amino acid position 82 or 166 as numbered in SEQ ID NO: 2 or a corresponding position thereof, and wherein the guide polynucleotide directs the adenosine base editor to effect an A-to-G nucleobase alteration in a LRRK2 gene a regulatory element thereof.

[0054] In some embodiments, the A-to-G nucleobase alteration is at a SNP associated with Parkinson's disease in the LRRK2 gene or regulatory element thereof. In some embodiments, the SNP associated with Parkinson Disease results in a A419V, a R1441C, a R1441H, or a G2019S amino acid mutation in a LRRK2 polypeptide as numbered in SEQ ID NO: 3, or a variant thereof, encoded by the LRRK2 gene.

[0055] In some embodiments, the A-to-G nucleobase alteration changes the SNP associated with Parkinson's disease to a wild type nucleobase. In some embodiments, the A-to-G nucleobase alteration changes the SNP associated with Parkinson's disease to a non-wild type nucleobase that results in ameliorated Parkinson's symptoms. In some embodiments, the A-to-G nucleobase alteration changes a Cysteine or Histidine to an Arginine in a LRRK2 polypeptide encoded by the LRRK2 gene. In some embodiments, the A-to-G alteration changes a Serine to a Glycine in a LRRK2 polypeptide encoded by the LRRK2 gene. In some embodiments, the A-to-G alteration replaces the Cysteine (C) or Histidine (H) with an Arginine (R) at position 144 or replaces the Serine with a Glycine (G) at position 2019 of a LRRK2 polypeptide as numbered in SEQ ID NO: 3, or a variant thereof, encoded by the LRRK2 gene. In some embodiments, the adenosine deaminase domain comprises an amino acid substitution at amino acid position 82 or 166 as numbered in SEQ ID NO: 2 or a corresponding position thereof.

[0056] In some embodiments, the guide polynucleotide comprises a nucleic acid sequence complementary to the LRRK2 gene or regulatory element thereof comprising the SNP associated with Parkinson's Disease. In some embodiments, the adenosine base editor is in complex with a single guide RNA (sgRNA) comprising a nucleic acid sequence complementary to the LRRK2 gene or regulatory element thereof comprising the SNP associated with Parkinson Disease. In some embodiments, the sgRNA comprises a nucleic acid sequence: 5′-AAGCGCAAGCCUGGAGGGAA-3′ (SEQ ID NO: 11); or 5′-ACUACAGCAUUGCUCAGUAC-3′ (SEQ ID NO: 12).

[0057] In some aspects, provided herein, is a base editor system comprising (i) an adenosine base editor or a nucleic acid sequence encoding the adenosine base editor and (ii) a guide polynucleotide or a nucleic acid sequence encoding the guide polynucleotide, wherein the adenosine base editor comprises a programmable DNA binding domain and an adenosine deaminase domain, wherein the adenosine deaminase domain comprises an amino acid substitution at amino acid position 82 or 166 as numbered in SEQ ID NO: 2 or a corresponding position thereof, and wherein the guide polynucleotide directs the adenosine base editor to effect an A-to-G nucleobase alteration in an alpha-L-iduronidase (IDUA) gene or a regulatory element thereof.

[0058] In some embodiments, the IDUA gene or regulatory element thereof comprises a SNP associated with Hurler syndrome. In some embodiments, the A-to-G nucleobase alteration is at the SNP associated with Hurler syndrome. In some embodiments, the SNP associated with Hurler syndrome results in a W402X or a W401X amino acid mutation in an IDUA polypeptide as numbered in SEQ ID NO: 4, or a variant thereof, encoded by the IDUA gene, wherein X is a stop codon.

[0059] In some embodiments, the A-to-G nucleobase alteration changes the SNP associated with Hurler syndrome to a wild type nucleobase. In some embodiments, the A-to-G nucleobase alteration changes the SNP associated with Hurler syndrome to a non-wild type nucleobase that results in one or more ameliorated symptoms of Hurler syndrome. In some embodiments, the A-to-G alteration at the SNP associated with Hurler Syndrome changes a stop codon to a tryptophan in an IDUA polypeptide encoded by the IDUA gene.

[0060] In some embodiments, the guide polynucleotide comprises a nucleic acid sequence complementary to the IDUA gene or regulatory element thereof comprising the SNP associated with Hurler syndrome. In some embodiments, the adenosine base editor is in complex with a single guide RNA (sgRNA) comprising a nucleic acid sequence complementary to the IDUA gene or regulatory element thereof comprising the SNP associated with Hurler syndrome. In some embodiments, the sgRNA comprises a nucleic acid sequence selected from the group consisting of: 5′-GACUCUAGGCAGAGGUCUCAA-3′ (SEQ ID NO: 7), 5′-ACUCUAGGCAGAGGUCUCAA-3′ (SEQ ID NO: 8), 5′-CUCUAGGCCGAAGUGUCGC-3′ (SEQ ID NO: 9), and 5′-GCUCUAGGCCGAAGUGUCGC-3′ (SEQ ID NO: 10).

[0061] In some aspects, provided herein, is a base editor system comprising (i) an adenosine base editor or a nucleic acid sequence encoding the adenosine base editor and (ii) a guide polynucleotide or a nucleic acid sequence encoding the guide polynucleotide, wherein the adenosine base editor comprises a programmable DNA binding domain and an adenosine deaminase domain, wherein the adenosine deaminase domain comprises an amino acid substitution at amino acid position 82 or 166 as numbered in SEQ ID NO: 2 or a corresponding position thereof, and wherein the guide polynucleotide directs the adenosine base editor to effect an A-to-G nucleobase alteration in a methyl CpG binding protein 2 (MECP2) gene or regulatory element thereof.

[0062] In some embodiments, the MECP2 gene or regulatory element thereof comprises a SNP associated with Rett syndrome. In some embodiments, the A-to-G nucleobase alteration is at the SNP associated with Rett Syndrome. In some embodiments, the SNP associated with Rett syndrome results in a R106W or a T158M amino acid mutation in a MECP2 polypeptide as numbered in SEQ ID NO: 5, or a variant thereof, encoded by the MECP2 gene. In some embodiments, the SNP associated with Rett syndrome results in a R255X or a R270X amino acid mutation in a MECP2 polypeptide encoded by the MECP2 gene, wherein X is a stop codon.

[0063] In some embodiments, the A-to-G nucleobase alteration changes the SNP associated with Rett syndrome to a wild type nucleobase. In some embodiments, the A-to-G nucleobase alteration changes the SNP associated with Rett syndrome to a non-wild type nucleobase that results in one or more ameliorated symptoms of Rett syndrome. In some embodiments, the A-to-G nucleobase alteration at the SNP associated with Rett Syndrome changes a stop codon to tryptophan in MECP2 polypeptide.

[0064] In some embodiments, the guide polynucleotide comprises a nucleic acid sequence complementary to the MECP2 gene or regulatory element thereof comprising the SNP associated with Rett syndrome. In some embodiments, the adenosine base editor is in complex with a single guide RNA (sgRNA) comprising a nucleic acid sequence complementary to the MECP2 gene or regulatory element thereof comprising the SNP associated with Rett syndrome. In some embodiments, the guide polynucleotide comprises a nucleic acid sequence selected from the group consisting of: 5′-CUUUUCACUUCCUGCCGGGG-3′ (SEQ ID NO: 13), 5′-AGCUUCCAUGUCCAGCCUUC-3′ (SEQ ID NO: 14), 5′-ACCAUGAAGUCAAAAUCAUU-3′ (SEQ ID NO: 15), and 5′-GCUUUCAGCCCCGUUUCUUG-3′ (SEQ ID NO: 16).

[0065] In some aspects, provided herein, is a base editor system comprising contacting (i) an adenosine base editor or a nucleic acid sequence encoding the adenosine base editor and (ii) a guide polynucleotide or a nucleic acid sequence encoding the guide polynucleotide, wherein the adenosine base editor comprises a programmable DNA binding domain and an adenosine deaminase domain, wherein the adenosine deaminase domain comprises an amino acid substitution at amino acid position 82 or 166 as numbered in SEQ ID NO: 2 or a corresponding position thereof, and wherein the guide polynucleotide directs the adenosine base editor to effect an A-to-G nucleobase alteration in an ATP binding cassette subfamily member 4 (ABCA4) gene or regulatory element thereof.

[0066] In some embodiments, the administration ameliorates at least one symptom related to Stargardt disease. In some embodiments, the administration results in faster amelioration of at least one symptom related to Stargardt disease as compared to treatment with a base editor without the amino acid substitution in the adenosine deaminase. In some embodiments, the ABCA4 gene comprises a SNP associated with Stargardt disease. In some embodiments, the A-to-G nucleobase alteration is at the SNP associated with Stargardt disease. In some embodiments, the SNP associated with Stargardt disease results in a A1038V, or a G1961E amino acid mutation in an ABCA4 polypeptide as numbered in SEQ ID NO: 6, or a variant thereof, encoded by the ABCA4 gene. In some embodiments, the SNP associated with Stargardt disease results in a G1961E amino acid mutation in the ABCA4 polypeptide as numbered in SEQ ID NO: 6, or a variant thereof.

[0067] In some embodiments, the A-to-G nucleobase alteration changes the SNP associated with Stargardt disease to a wild type nucleobase. In some embodiments, the A-to-G nucleobase alteration changes the SNP associated with Stargardt disease to a non-wild type nucleobase that results in ameliorated Stargardt Disease symptoms. In some embodiments, the guide polynucleotide comprises a nucleic acid sequence complementary to the ABCA4 gene or regulatory element thereof comprising the SNP associated with Stargardt Disease.

[0068] In some embodiments, the adenosine base editor is in complex with a single guide RNA (sgRNA) comprising a nucleic acid sequence complementary to the ABCA4 gene or regulatory element thereof comprising the SNP associated with Stargardt Disease. In some embodiments, the sgRNA comprises the sequence 5′-CUCCAGGGCGAACUUCGACACACAGC-3′ (SEQ ID NO: 17).

[0069] In various aspects and embodiments provided herein, the polynucleotide programmable DNA binding domain is a Cas9. In some embodiments, the Cas9 is a SpCas9, a SaCas9, or a variant thereof. In some embodiments, the polynucleotide programmable DNA binding domain comprises a modified SpCas9 having an altered protospacer-adjacent motif (PAM) specificity. In some embodiments, the Cas9 has specificity for a PAM sequence selected from the group consisting of NGG, NGA, NGCG, NGN, NNGRRT, NNNRRT, NGCG, NGCN, NGTN, and NGC, wherein N is A, G, C, or T and wherein R is A or G. In some embodiments, the polynucleotide programmable DNA binding domain is a nuclease inactive variant. In some embodiments, the polynucleotide programmable DNA binding domain is a nickase variant. In some embodiments, the nickase variant comprises an amino acid substitution D10A or a corresponding amino acid substitution thereof.

[0070] In various aspects and embodiments provided herein, the adenosine deaminase domain comprises a TadA domain. In some embodiments, the adenosine deaminase comprises a TadA deaminase comprising a V82S alteration and/or a T166R alteration.

[0071] In various aspects and embodiments provided herein, the adenosine deaminase further comprises one or more of the following alterations: Y147T, Y147R, Q154S, Y123H, Q154R, or a combination thereof. In various aspects and embodiments provided herein, the adenosine deaminase comprises a combination of alterations selected from the group consisting of: Y147R+Q154R+Y123H; Y147R+Q154R+I76Y; Y147R+Q154R+T166R; Y147T+Q154R; Y147T+Q154S; and Y123H+Y147R+Q154R+I76Y. In some embodiments, the adenosine base editor domain comprises an adenosine deaminase monomer. In some embodiments, the adenosine base editor comprises an adenosine deaminase dimer.

[0072] In various aspects and embodiments provided herein, the TadA deaminase is a TadA*8 variant. In some embodiments, the TadA*8 variant is selected from the group consisting of: TadA*8.1, TadA*8.2, TadA*8.3, TadA*8.4, TadA*8.5, TadA*8.6, TadA*8.7, TadA*8.8, TadA*8.9, TadA*8.10, TadA*8.11, TadA*8.12, and TadA*8.13. In some embodiments, the adenosine base editor is an ABE8 base editor selected from the group consisting of: ABE8.1, ABE8.2, ABE8.3, ABE8.4, ABE8.5, ABE8.6, ABE8.7, ABE8.8, ABE8.9, ABE8.10, ABE8.11, ABE8.12, and ABE8.13.

[0073] In some aspects, provided herein, is a vector comprising the nucleic acid sequence encoding the adenosine base editor described herein. In some aspects, provided herein, is a vector comprising the nucleic acid sequence encoding the adenosine base editor and the guide polynucleotide described herein. In some embodiments, the vector is a viral vector, a lentiviral vector, or an AAV vector.

[0074] In some aspects, provided herein, is a cell comprising the base editor system or the vector described herein. In some embodiments, the cell is a central nervous system cell. In some embodiments, the cell is a neuron. In some embodiments, the cell is a photoreceptor. In some embodiments, the cell is in vitro, in vivo, or ex vivo.

[0075] In some aspects, provided herein, is a pharmaceutical composition comprising the base editor, the vector, or the cell described herein and a pharmaceutically acceptable carrier. In one embodiment, the pharmaceutical composition described herein further comprises a lipid. In another embodiment, the pharmaceutical composition described herein further comprises a virus.

[0076] In some aspects, provided herein, is a kit comprising the base editor or the vector described herein.

[0077] In various embodiments of the methods described herein, at least one nucleotide of the guide polynucleotide comprises a non-naturally occurring modification. In various embodiments of the methods described herein, at least one nucleotide of the nucleic acid sequence comprises a non-naturally occurring modification. In various embodiments, at least one nucleotide of the nucleic acid sequence of the base editor system comprises a non-naturally occurring modification. In some embodiments, the non-naturally occurring modification is a chemical modification. In some embodiments, the chemical modification is a 2′-O-methylation. In some embodiments, the nucleic acid sequence comprises a phosphorothioate.

[0078] The description and examples herein illustrate embodiments of the present disclosure in detail. It is to be understood that this disclosure is not limited to the particular embodiments described herein and as such can vary. Those of skill in the art will recognize that there are numerous variations and modifications of this disclosure, which are encompassed within its scope.

[0079] The practice of some embodiments disclosed herein employ, unless otherwise indicated, conventional techniques of immunology, biochemistry, chemistry, molecular biology, microbiology, cell biology, genomics and recombinant DNA, which are within the skill of the art. See for example Sambrook and Green, Molecular Cloning: A Laboratory Manual, 4th Edition (2012); the series Current Protocols in Molecular Biology (F. M. Ausubel, et al. eds.); the series Methods In Enzymology (Academic Press, Inc.), PCR 2: A Practical Approach (M. J. MacPherson, B. D. Hames and G. R. Taylor eds. (1995)), Harlow and Lane, eds. (1988) Antibodies, A Laboratory Manual, and Culture of Animal Cells: A Manual of Basic Technique and Specialized Applications, 6th Edition (R. I. Freshney, ed. (2010)).

[0080] The section headings used herein are for organizational purposes only and are not to be construed as limiting the subject matter described.

[0081] Although various features of the present disclosure can be described in the context of a single embodiment, the features can also be provided separately or in any suitable combination. Conversely, although the present disclosure can be described herein in the context of separate embodiments for clarity, the present disclosure can also be implemented in a single embodiment. The section headings used herein are for organizational purposes only and are not to be construed as limiting the subject matter described.

[0082] The features of the present disclosure are set forth with particularity in the appended claims. A better understanding of the features and advantages of the present will be obtained by reference to the following detailed description that sets forth illustrative embodiments, in which the principles of the disclosure are utilized, and in view of the accompanying drawings as described hereinbelow.

### Definitions

[0083] The following definitions supplement those in the art and are directed to the current application and are not to be imputed to any related or unrelated case, e.g., to any commonly owned patent or application. Although any methods and materials similar or equivalent to those described herein can be used in the practice for testing of the present disclosure, the preferred materials and methods are described herein. Accordingly, the terminology used herein is for the purpose of describing particular embodiments only, and is not intended to be limiting.

[0084] Unless defined otherwise, all technical and scientific terms used herein have the meaning commonly understood by a person skilled in the art to which this invention belongs. The following references provide one of skill with a general definition of many of the terms used in this invention: Singleton et al., Dictionary of Microbiology and Molecular Biology (2nd ed. 1994); The Cambridge Dictionary of Science and Technology (Walker ed., 1988); The Glossary of Genetics, 5th Ed., R. Rieger et al. (eds.), Springer Verlag (1991); and Hale & Marham, The Harper Collins Dictionary of Biology (1991).

[0085] In this application, the use of the singular includes the plural unless specifically stated otherwise. It must be noted that, as used in the specification, the singular forms “a,” “an,” and “the” include plural references unless the context clearly dictates otherwise. In this application, the use of “or” means “and/or,” unless stated otherwise, and is understood to be inclusive. Furthermore, use of the term “including” as well as other forms, such as “include,” “includes,” and “included,” is not limiting.

[0086] As used in this specification and claim(s), the words “comprising” (and any form of comprising, such as “comprise” and “comprises”), “having” (and any form of having, such as “have” and “has”), “including” (and any form of including, such as “includes” and “include”) or “containing” (and any form of containing, such as “contains” and “contain”) are inclusive or open-ended and do not exclude additional, unrecited elements or method steps. It is contemplated that any embodiment discussed in this specification can be implemented with respect to any method or composition of the present disclosure, and vice versa. Furthermore, compositions of the present disclosure can be used to achieve methods of the present disclosure.

[0087] The term “about” or “approximately” means within an acceptable error range for the particular value as determined by one of ordinary skill in the art, which will depend in part on how the value is measured or determined, i.e., the limitations of the measurement system. For example, “about” can mean within 1 or more than 1 standard deviation, per the practice in the art. Alternatively, “about” can mean a range of up to 20%, up to 10%, up to 5%, or up to 1% of a given value. Alternatively, particularly with respect to biological systems or processes, the term can mean within an order of magnitude, such as within 5-fold or within 2-fold, of a value. Where particular values are described in the application and claims, unless otherwise stated the term “about” meaning within an acceptable error range for the particular value should be assumed.

[0088] Ranges provided herein are understood to be shorthand for all of the values within the range. For example, a range of 1 to 50 is understood to include any number, combination of numbers, or sub-range from the group consisting 1, 2, 3, 4, 5, 6, 7, 8, 9, 10, 11, 12, 13, 14, 15, 16, 17, 18, 19, 20, 21, 22, 23, 24, 25, 26, 27, 28, 29, 30, 31, 32, 33, 34, 35, 36, 37, 38, 39, 40, 41, 42, 43, 44, 45, 46, 47, 48, 49, or 50.

[0089] Reference in the specification to “some embodiments,” “an embodiment,” “one embodiment” or “other embodiments” means that a particular feature, structure, or characteristic described in connection with the embodiments is included in at least some embodiments, but not necessarily all embodiments, of the present disclosures.

[0090] By “abasic base editor” is meant an agent capable of excising a nucleobase and inserting a DNA nucleobase (A, T, C, or G). Abasic base editors comprise a nucleic acid glycosylase polypeptide or fragment thereof. In one embodiment, the nucleic acid glycosylase is a mutant human uracil DNA glycosylase comprising an Asp at amino acid 204 (e.g., replacing an Asn at amino acid 204) in the following sequence, or corresponding position in a uracil DNA glycosylase, and having cytosine-DNA glycosylase activity, or active fragment thereof. In one embodiment, the nucleic acid glycosylase is a mutant human uracil DNA glycosylase comprising an Ala, Gly, Cys, or Ser at amino acid 147 (e.g., replacing a Tyr at amino acid 147) in the following sequence, or corresponding position in a uracil DNA glycosylase, and having thymine-DNA glycosylase activity, or an active fragment thereof. The sequence of exemplary human uracil-DNA glycosylase, isoform 1, follows:

| | (SEQ ID NO: 18) |
|---|---|
| 1 | mgvfclgpwg igrklrtpgk gplqllsrlc |
| | gdhlqaipak kapagqeepg tppssplsae |
| 61 | qldriqrnka aallrlaarn vpvgfgeswk |
| | khlsgefgkp yfikimgfva eerkhytvyp |
| 121 | pphqvftwtq mcdikdvkvv ilgqdpyhgp |
| | nqahglcfsv qrpvppppsl eniykelstd |
| 181 | iedfvhpghg dlsgwakqgv lllnavltvr |
| | ahqanshker gweqftdavv swlnqnsngl |
| 241 | vfllwgsyaq kkgsaidrkr hhvlqtahps |
| | plsvyrgffg crhfsktnel iqksgkkpid |
| 301 | wkel |

[0091] The sequence of human uracil-DNA glycosylase, isoform 2, follows:

| | (SEQ ID NO: 19) |
|---|---|
| 1 | migqktlysf fspsparkrh apspepavqg |
| | tgvagvpees gdaaaipakk apagqeepgt |
| 61 | ppssplsaeq idriqrnkaa allrlaarnv |
| | pvgfgeswkk hlsgefgkpy fikimgfvae |
| 121 | erkhytvypp phqvftwtqm cdikdvkvvi |
| | lgqdpyhgpn qahglcfsvq rpvppppsle |
| 181 | niykelstdi edfvhpghgd isgwakqgvl |
| | llnavltvra hqanshkerg weqftdavvs |
| 241 | wlnqnsnglv fllwgsyaqk kgsaidrkrh |
| | hvlqtahpsp lsvyrgffgc rhfsktnell |
| 301 | qksgkkpidw kel |

[0092] In other embodiments, the abasic editor is any one of the abasic editors described in PCT/JP2015/080958 and US20170321210, which are incorporated herein by reference. In particular embodiments, the abasic editor comprises a mutation at a position shown in the sequence above in bold with underlining or at a corresponding amino acid in any other abasic editor or uracil deglycosylase known in the art. In one embodiment, the abasic editor comprises a mutation at Y147, N204, L272, and/or 8276, or corresponding position. In another embodiment, the abasic editor comprises a Y147A or Y147G mutation, or corresponding mutation. In another embodiment, the abasic editor comprises a N204D mutation, or corresponding mutation. In another embodiment, the abasic editor comprises a L272A mutation, or corresponding mutation. In another embodiment, the abasic editor comprises a R276E or R276C mutation, or corresponding mutation.

[0093] By “adenosine deaminase” is meant a polypeptide or fragment thereof capable of catalyzing the hydrolytic deamination of adenine or adenosine. In some embodiments, the deaminase or deaminase domain is an adenosine deaminase catalyzing the hydrolytic deamination of adenosine to inosine or deoxy adenosine to deoxyinosine. In some embodiments, the adenosine deaminase catalyzes the hydrolytic deamination of adenine or adenosine in deoxyribonucleic acid (DNA). The adenosine deaminases (e.g., engineered adenosine deaminases, evolved adenosine deaminases) provided herein may be from any organism, such as a bacterium.

[0094] In some embodiments, the adenosine deaminase is a TadA deaminase. In some embodiments, the TadA deaminase is TadA variant. In some embodiments, the TadA variant is a TadA*8. In some embodiments, the deaminase or deaminase domain is a variant of a naturally occurring deaminase from an organism, such as a human, chimpanzee, gorilla, monkey, cow, dog, rat, or mouse. In some embodiments, the deaminase or deaminase domain does not occur in nature. For example, in some embodiments, the deaminase or deaminase domain is at least 50%, at least 55%, at least 60%, at least 65%, at least 70%, at least 75% at least 80%, at least 85%, at least 90%, at least 91%, at least 92%, at least 93%, at least 94%, at least 95%, at least 96%, at least 97%, at least 98%, at least 99%, at least 99.1%, at least 99.2%, at least 99.3%, at least 99.4%, at least 99.5%, at least 99.6%, at least 99.7%, at least 99.8%, or at least 99.9% identical to a naturally occurring deaminase. For example, deaminase domains are described in International PCT Application Nos. PCT/2017/045381 (WO 2018/027078) and PCT/US2016/058344 (WO 2017/070632), each of which is incorporated herein by reference for its entirety. Also, see Komor, A. C., et al., “Programmable editing of a target base in genomic DNA without double-stranded DNA cleavage” Nature 533, 420-424 (2016); Gaudelli, N. M., et al., “Programmable base editing of A•T to G•C in genomic DNA without DNA cleavage” Nature 551, 464-471 (2017); Komor, A. C., et al., “Improved base excision repair inhibition and bacteriophage Mu Gam protein yields C:G-to-T:A base editors with higher efficiency and product purity” Science Advances 3: eaao4774 (2017)), and Rees, H. A., et al., “Base editing: precision chemistry on the genome and transcriptome of living cells.” Nat Rev Genet. 2018 December; 19(12):770-788. doi: 10.1038/s41576-018-0059-1, the entire contents of which are hereby incorporated by reference.

[0095] A wild type TadA(wt) adenosine deaminase has the following sequence (also termed TadA reference sequence):

(SEQ ID NO: 2)
MSEVEFSHEYWMRHALTLAKRAWDEREVPVG
AVLVHNNRVIGEGWNRPIGRHDPTAHAEIMA
LRQGGLVMQNYRLIDATLYVTLEPCVMCAGA
MIHSRIGRVVFGARDAKTGAAGSLMDVLHHP
GMNHRVEITEGILADECAALLSDFFRMRRQE
IKAQKKAQSSTD.

[0096] In some embodiments, the adenosine deaminase comprises an alteration in the following sequence:

(SEQ ID NO: 20)
MSEVEESHEY WMRHALTLAK RARDEREVPV
GAVLVLNNRV IGEGWNRAIG LHDPTAHAEI
MALRQGGLVM QNYRLIDATL YVTFEPCVMC
AGAMIHSRIG RVVFGVRNAK TGAAGSLMDV
LHYPGMNHRV EITEGILADE CAALLCYFFR
MPRQVFNAQK KAQSSTD

(also termed TadA*7.10).

[0097] In some embodiments, TadA*7.10 comprises at least one alteration. In some embodiments, TadA*7.10 comprises an alteration at amino acid 82 and/or 166. In particular embodiments, a variant of the above-referenced sequence comprises one or more of the following alterations: Y147T, Y147R, Q154S, Y123H, V82S, T166R, and/or Q154R. The alteration Y123H is also referred to herein as H123H (the alteration H123Y in TadA*7.10 reverted back to Y123H (wt)). In other embodiments, a variant of the TadA*7.10 sequence comprises a combination of alterations selected from the group consisting of: Y147T+Q154R; Y147T+Q154S; Y147R+Q154S; V82S+Q154S; V82S+Y147R; V82S+Q154R; V82S+Y123H; I76Y+V82S; V82S+Y123H+Y147T; V82S+Y123H+Y147R; V82S+Y123H+Q154R; Y147R+Q154R+Y123H; Y147R+Q154R+I76Y; Y147R+Q154R+T166R; Y123H+Y147R+Q154R+I76Y; V82S+Y123H+Y147R+Q154R; and I76Y+V82S+Y123H+Y147R+Q154R.

[0098] In other embodiments, the invention provides adenosine deaminase variants that include deletions, e.g., TadA*8, comprising a deletion of the C terminus beginning at residue 149, 150, 151, 152, 153, 154, 155, 156, or 157. In other embodiments, the adenosine deaminase variant is a TadA (e.g., TadA*8) monomer comprising one or more of the following alterations: Y147T, Y147R, Q154S, Y123H, V82S, T166R, and/or Q154R. In other embodiments, the adenosine deaminase variant is TadA (e.g., TadA*8) a monomer comprising a combination of alterations selected from the group consisting of: Y147T+Q154R; Y147T+Q154S; Y147R+Q154S; V82S+Q154S; V82S+Y147R; V82S+Q154R; V82S+Y123H; I76Y+V82S; V82S+Y123H+Y147T; V82S+Y123H+Y147R; V82S+Y123H+Q154R; Y147R+Q154R+Y123H; Y147R+Q154R+I76Y; Y147R+Q154R+T166R; Y123H+Y147R+Q154R+I76Y; V82S+Y123H+Y147R+Q154R; and I76Y+V82S+Y123H+Y147R+Q154R.

[0099] In still other embodiments, the adenosine deaminase variant is a homodimer comprising two adenosine deaminase domains (e.g., TadA*8) each having one or more of the following alterations Y147T, Y147R, Q154S, Y123H, V82S, T166R, and/or Q154R. In other embodiments, the adenosine deaminase variant is a homodimer comprising two adenosine deaminase domains (e.g., TadA*8) each having a combination of alterations selected from the group consisting of: Y147T+Q154R; Y147T+Q154S; Y147R+Q154S; V82S+Q154S; V82S+Y147R; V82S+Q154R; V82S+Y123H; I76Y+V82S; V82S+Y123H+Y147T; V82S+Y123H+Y147R; V82S+Y123H+Q154R; Y147R+Q154R+Y123H; Y147R+Q154R+I76Y; Y147R+Q154R+T166R; Y123H+Y147R+Q154R+I76Y; V82S+Y123H+Y147R+Q154R; and I76Y+V82S+Y123H+Y147R+Q154R.

[0100] In other embodiments, the adenosine deaminase variant is a heterodimer comprising a wild-type TadA adenosine deaminase domain and an adenosine deaminase variant domain (e.g., TadA*8) comprising one or more of the following alterations Y147T, Y147R, Q154S, Y123H, V82S, T166R, and/or Q154R. In other embodiments, the adenosine deaminase variant is a heterodimer comprising a wild-type TadA adenosine deaminase domain and an adenosine deaminase variant domain (e.g. TadA*8) comprising a combination of alterations selected from the group consisting of: Y147T+Q154R; Y147T+Q154S; Y147R+Q154S; V82S+Q154S; V82S+Y147R; V82S+Q154R; V82S+Y123H; I76Y+V82S; V82S+Y123H+Y147T; V82S+Y123H+Y147R; V82S+Y123H+Q154R; Y147R+Q154R+Y123H; Y147R+Q154R+I76Y; Y147R+Q154R+T166R; Y123H+Y147R+Q154R+I76Y; V82S+Y123H+Y147R+Q154R; and I76Y+V82S+Y123H+Y147R+Q154R.

[0101] In other embodiments, the adenosine deaminase variant is a heterodimer comprising a TadA*7.10 domain and an adenosine deaminase variant domain (e.g., TadA*8) comprising one or more of the following alterations Y147T, Y147R, Q154S, Y123H, V82S, T166R, and/or Q154R. In other embodiments, the adenosine deaminase variant is a heterodimer comprising a TadA*7.10 domain and an adenosine deaminase variant domain (e.g. TadA*8) comprising a combination of the following alterations: Y147T+Q154R; Y147T+Q154S; Y147R+Q154S; V82S+Q154S; V82S+Y147R; V82S+Q154R; V82S+Y123H; I76Y+V82S; V82S+Y123H+Y147T; V82S+Y123H+Y147R; V82S+Y123H+Q154R; Y147R+Q154R+Y123H; Y147R+Q154R+I76Y; Y147R+Q154R+T166R; Y123H+Y147R+Q154R+I76Y; V82S+Y123H+Y147R+Q154R; or I76Y+V82S+Y123H+Y147R+Q154R.

[0102] In one embodiment, the adenosine deaminase is a TadA*8 that comprises or consists essentially of the following sequence or a fragment thereof having adenosine deaminase activity:

SEQ ID NO: 21)
MSEVEFSHEYWMRHALTLAKRARDEREVP
VGAVLVLNNRVIGEGWNRAIGLHDPTAHA
EIMALRQGGLVMQNYRLIDATLYVTFEPC
VMCAGAMIHSRIGRVVFGVRNAKTGAAGS
LMDVLHYPGMNHRVEITEGILADECAALL
CTFFRMPRQVFNAQKKAQSSTD.

[0103] In some embodiments, the TadA*8 is truncated. In some embodiments, the truncated TadA*8 is missing 1, 2, 3, 4, 5, 6, 7, 8, 9, 10, 11, 12, 13, 14, 15, 6, 17, 18, 19, or 20 N-terminal amino acid residues relative to the full length TadA*8. In some embodiments, the truncated TadA*8 is missing 1, 2, 3, 4, 5, 6, 7, 8, 9, 10, 11, 12, 13, 14, 15, 6, 17, 18, 19, or 20 C-terminal amino acid residues relative to the full length TadA*8. In some embodiments the adenosine deaminase variant is a full-length TadA*8.

[0104] In particular embodiments, an adenosine deaminase heterodimer comprises a TadA*8 domain and an adenosine deaminase domain selected from one of the following:

[0105] In particular embodiments, an adenosine deaminase heterodimer comprises a TadA*8 domain and an adenosine deaminase domain selected from one of the following:

Escherichia coli TadA:
(SEQ ID NO: 22)
MRRAFITGVFFLSEVEFSHEYWMRHALTLAKRAWD
EREVPVGAVLVHNNRVIGEGWNRPIGRHDPTAHAE
IMALRQGGLVMQNYRLIDATLYVTLEPCVMCAGAM
IHSRIGRVVFGARDAKTGAAGSLMDVLHHPGMNHR
VEITEGILADECAALLSDFFRMRRQEIKAQKKAQS
STD
E. coli TadA (N-terminal truncated):
(SEQ ID NO: 2)
MSEVEFSHEYWMRHALTLAKRAWDEREVPVGAVLV
HNNRVIGEGWNRPIGRHDPTAHAEIMALRQGGLVM
ONYRLIDATLYVTLEPCVMCAGAMIHSRIGRVVFG
ARDAKTGAAGSLMDVLHHPGMNHRVEITEGILADE
CAALLSDFFRMRRQEIKAQKKAQSSTD
Staphylococcus aureus
(S. aureus) TadA:
(SEQ ID NO: 23)
MGSHMTNDIYFMTLAIEEAKKAAQLGEVPIGAIIT
KDDEVIARAHNLRETLQQPTAHAEHIAIERAAKVL
GSWRLEGCTLYVTLEPCVMCAGTIVMSRIPRVVYG
ADDPKGGCSGSLMNLLQOSNFNHRAIVDKGVLKEA
CSTLLTTFFKNLRANKKSTN
Bacillus subtilis
(B. subtilis) TadA:
(SEQ ID NO: 24)
MTQDELYMKEAIKEAKKAEEKGEVPIGAVLVINGE
IIARAHNLRETEQRSIAHAEMLVIDEACKALGTWR
LEGATLYVTLEPCPMCAGAVVLSRVEKVVFGAFDP
KGGCSGTLMNLLQEERFNHQAEVVSGVLEEECGGM
LSAFFRELRKKKKAARKNLSE
Salmonella typhimurium
(S. typhimurium) TadA:
(SEQ ID NO: 25)
MPPAFITGVTSLSDVELDHEYWMRHALTLAKRAWD
EREVPVGAVLVHNHRVIGEGWNRPIGRHDPTAHAE
IMALRQGGLVLQNYRLLDTTLYVTLEPCVMCAGAM
VHSRIGRVVFGARDAKTGAAGSLIDVLHHPGMNHR
VEIIEGVLRDECATLLSDFFRMRRQEIKALKKADR
AEGAGPAV
Shewanella putrefaciens
(S. putrefaciens) TadA:
(SEQ ID NO: 26)
MDEYWMQVAMQMAEKAEAAGEVPVGAVLVKDGQQI
ATGYNLSISQHDPTAHAEILCLRSAGKKLENYRLL
DATLYITLEPCAMCAGAMVHSRIARWYGARDEKTG
AAGTWNLLQHPAFNHQVEVTSGVLAEACSAQLSRF
FKRRRDEKKALKLAQRAQQGIE
Haemophilus influenzae F3031
(H. influenzae) TadA:
(SEQ ID NO: 27)
MDAAKVRSEFDEKMMRYALELADKAEALGEIPVGA
VLVDDARNIIGEGWNLSIVQSDPTAHAEIIALRNG
AKNIQNYRLLNSTLYVTLEPCTMCAGAILHSRIKR
LVFGASDYKTGAIGSRFHFFDDYKMNHTLEITSGV
LAEECSQKLSTFFQKRREEKKIEKALLKSLSDK
Caulobacter crescentus
(C. crescentus) TadA:
(SEQ ID NO: 28)
MRTDESEDQDHRMMRLALDAARAAAEAGETPVGAV
ILDPSTGEVIATAGNGPIAAHDPTAHAEIAAMRAA
AAKLGNYRLTDLTLWTLEPCAMCAGAISHARIGRW
FGADDPKGGAWHGPKFFAQPTCHWRPEVTGGVLAD
ESADLLRGFFRARRKAKI
Geobacter sulfurreducens
(G. sulfurreducens) TadA:
(SEQ ID NO: 29)
MSSLKKTPIRDDAYWMGKAIREAAKAAARDEVPIG
AVIVRDGAVIGRGHNLREGSNDPSAHAEMIAIRQA
ARRSANWRLTGATLYVTLEPCLMCMGAIILARLER
VVFGCYDPKGGAAGSLYDLSADPRLNHQVRLSPGV
CQEECGTMLSDFFRDLRRRKKAKATPALFIDERKV
PPEP
TadA*7.10
(SEQ ID NO: 20)
MSEVEFSHEYWMRHALTLAKRARDEREVPVGAVLV
LNNRVIGEGWNRAIGLHDPTAHAEIMALRQGGLVM
QNYRLIDATLYVTFEPCVMCAGAMIHSRIGRVVFG
VRNAKTGAAGSLMDVLHYPGMNHRVEITEGILADE
CAALLCYFFRMPRQVFNAQKKAQSSTD

[0106] Additional TadA7.10 or TadA7.10 variants contemplated as a component of a heterodimer with a TadA*8 include:

(SEQ ID NO: 30)
GSSGSETPGTSESATPESSGSEVEFSHEYWMRHAL
TLAKRARDEREVPVGAVLVLNNRVIGEGWNRAIGL
HDPTAHAEIMALRQGGLVMQNYRLIDATLYVTFEP
CVMCAGAMIHSRIGRVVFGVRNAKTGAAGSLMDVL
HYPGMNHRVEITEGILADECAALLCYFFRMPRQVF
NAQKKAQSSTD
TadA7.10 CP65
(SEQ ID NO: 31)
TAHAEIMALRQGGLVMQNYRLIDATLYVTFEPCVM
CAGAMIHSRIGRVVFGVRNAKTGAAGSLMDVLHYP
GMNHRVEITEGILADECAALLCYFFRMPRQVFNAQ
KKAQSSTDGSSGSETPGTSESATPESSGSEVEFSH
EYWMRHALTLAKRARDEREVPVGAVLVLNNRVIGE
GWNRAIGLHDP
TadA7.10 CP83
(SEQ ID NO: 32)
YRL1DATLYVTFEPCVMCAGAMIHSRIGRVVFGVRNAKT
GAAGSLMDVLHYPGMNHRVEITEGILADECAALLC
YFFRMPRQVFNAQKKAQSSTDGSSGSETPGTSESA
TPESSGSEVEFSHEYWMRHALTLAKRARDEREVPV
GAVLVLNNRVIGEGWNRAIGLHDPTAHAEIMALRQ
GGLVMQN
TadA7.10 CP 136
(SEQ ID NO: 33)
MNHRVEITEGILADECAALLCYFFRMPRQVFNAQK
KAQSSTDGSSGSETPGTSESATPESSGSEVEFSHE
YWMRHALTLAKRARDEREVPVGAVLVLNNRVIGEG
WNRAIGLHDPTAHAEIMALRQGGLVMQNYRLIDAT
LYVTFEPCVMCAGAMIHSRIGRVVFGVRNAKTGAA
GSLMDVLHYPG
TadA7.10 C-truncate
(SEQ ID NO: 34)
GSSGSETPGTSESATPESSGSEVEFSHEYWMRHAL
TLAKRARDEREVPVGAVLVLNNRVIGEGWNRAIGL
HDPTAHAEIMALRQGGLVMQNYRLIDATLYVTFEP
CVMCAGAMIHSRIGRVVFGVRNAKTGAAGSLMDVL
HYPGMNHRVEITEGILADECAALLCYFFRMPRQVF
N
TadA7.10 C-truncate 2
(SEQ ID NO: 35)
GSSGSETPGTSESATPESSGSEVEFSHEYWMRHAL
TLAKRARDEREVPVGAVLVLNNRVIGEGWNRAIGL
HDPTAHAEIMALRQGGLVMQNYRLIDATLYVTFEP
CVMCAGAMIHSRIGRVVFGVRNAKTGAAGSLMDVL
HYPGMNHRVEITEGILADECAALLCYFFRMPRQ
TadA7.10 delta59-66+C-truncate
(SEQ ID NO: 36)
GSSGSETPGTSESATPESSGSEVEFSHEYWMRHAL
TLAKRARDEREVPVGAVLVLNNRVIGEGWNRAHAE
IMALRQGGLVMQNYRLIDATLYVTFEPCVMCAGAM
IHSRIGRWFGVRNAKTGAAGSLMDVLHYPGMNHRV
EITEGILADECAALLCYFFRMPRQVFN
TadA7.10 delta 59-66
(SEQ ID NO: 37)
GSSGSETPGTSESATPESSGSEVEFSHEYWMRHAL
TLAKRARDEREVPVGAVLVLNNRVIGEGWNRAHAE
IMALRQGGLVMQNYRLIDATLYVTFEPCVMCAGAM
IHSRIGRWFGVRNAKTGAAGSLMDVLHYPGMNHRV
EITEGILADECAALLCYFFRMPRQVFNAQKKAQSS
TD.

[0107] In some embodiments, the adenosine deaminase variant comprises an alteration in TadA7.10. In some embodiments, TadA7.10 comprises an alteration at amino acid 82 or 166. In particular embodiments, a variant in the above-referenced sequence comprises one or more of the following alterations: Y147T, Y147R, Q154S, Y123H, V82S, T166R, and Q154R. In other embodiments, the adenosine deaminase variant comprises a combination of alterations selected from the group consisting of Y147R+Q154R+Y123H; Y147R+Q154R+I76Y; Y147R+Q154R+T166R; Y147T+Q154R; Y147T+Q154S; and Y123H+Y147R+Q154R+I76Y.

[0108] In other embodiments, the invention provides adenosine deaminase variants that include deletions, e.g., TadA7.10 comprising a deletion of the C terminus beginning at residue 149, 150, 151, 152, 153, 154, 155, 156, or 157. In other embodiments, the adenosine deaminase variant is a TadA monomer comprising one or more of the following alterations: Y147T, Y147R, Q154S, Y123H, V82S, T166R, Q154R. In other embodiments, the adenosine deaminase variant is a monomer comprising the following alterations: Y147R+Q154R+Y123H; Y147R+Q154R+I76Y; Y147R+Q154R+T166R; Y147T+Q154R; Y147T+Q154S; and Y123H+Y147 R+Q154R+I76Y. In still other embodiments, the adenosine deaminase variant is a homodimer comprising two adenosine deaminase domains each having one or more of the following alterations Y147T, Y147R, Q154S, Y123H, V82S, T166R, Q154R. In other embodiments, the adenosine deaminase variant is a heterodimer comprising a wild-type adenosine deaminase domain or a TadA7.10 domain and an adenosine deaminase variant domain comprising one or more of the following alterations Y147T, Y147R, Q154S, Y123H, V82S, T166R, Q154R. In other embodiments, the adenosine deaminase variant is a heterodimer comprising a TadA7.10 domain and an adenosine deaminase variant of TadA7.10 comprising the following alterations: Y147R+Q154R+Y123H; Y147R+Q154R+I76Y; Y147R+Q154R+T166R; Y147T+Q154R; Y147T+Q154S; and Y123H+Y147R+Q154R+I76Y.

[0109] “Administering” is referred to herein as providing one or more compositions described herein to a patient or a subject. By way of example and without limitation, composition administration, e.g., injection, can be performed by intravenous (i.v.) injection, sub-cutaneous (s.c.) injection, intradermal (i.d.) injection, intraperitoneal (i.p.) injection, or intramuscular (i.m.) injection. One or more such routes can be employed. Parenteral administration can be, for example, by bolus injection or by gradual perfusion over time. In some embodiments, parenteral administration includes infusing or injecting intravascularly, intravenously, intramuscularly, intraarterially, intrathecally, intratumorally, intradermally, intraperitoneally, transtracheally, subcutaneously, subcuticularly, intraarticularly, subcapsularly, subarachnoidly and intrasternally. Alternatively, or concurrently, administration can be by the oral route.

[0110] By “agent” is meant any small molecule chemical compound, antibody, nucleic acid molecule, or polypeptide, or fragments thereof.

[0111] By “alteration” is meant a change (e.g. increase or decrease) in the structure, expression levels or activity of a gene or polypeptide as detected by standard art known methods such as those described herein. As used herein, an alteration includes a change in a polynucleotide or polypeptide sequence or a change in expression levels, such as a 10% change, a 25% change, a 40% change, a 50% change, or greater.

[0112] By “ameliorate” is meant decrease, suppress, attenuate, diminish, arrest, or stabilize the development or progression of a disease.

[0113] By “analog” is meant a molecule that is not identical, but has analogous functional or structural features. For example, a polynucleotide or polypeptide analog retains the biological activity of a corresponding naturally-occurring polynucleotide or polypeptide, while having certain modifications that enhance the analog's function relative to a naturally occurring polynucleotide or polypeptide. Such modifications could increase the analog's affinity for DNA, efficiency, specificity, protease or nuclease resistance, membrane permeability, and/or half-life, without altering, for example, ligand binding. An analog may include an unnatural nucleotide or amino acid.

[0114] By “base editor (BE)” or “nucleobase editor (NBE)” is meant an agent that binds a polynucleotide and has nucleobase modifying activity. In various embodiment, the base editor comprises a nucleobase modifying polypeptide (e.g., a deaminase) and a nucleic acid programmable nucleotide binding domain in conjunction with a guide polynucleotide (e.g., guide RNA). In various embodiments, the agent is a biomolecular complex comprising a protein domain having base editing activity, i.e., a domain capable of modifying a base (e.g., A, T, C, G, or U) within a nucleic acid molecule (e.g., DNA). In some embodiments, the polynucleotide programmable DNA binding domain is fused or linked to a deaminase domain. In one embodiment, the agent is a fusion protein comprising a domain having base editing activity. In another embodiment, the protein domain having base editing activity is linked to the guide RNA (e.g., via an RNA binding motif on the guide RNA and an RNA binding domain fused to the deaminase). In some embodiments, the domain having base editing activity is capable of deaminating a base within a nucleic acid molecule. In some embodiments, the base editor is capable of deaminating one or more bases within a DNA molecule. In some embodiments, the base editor is capable of deaminating an adenosine (A) within DNA. In some embodiments, the base editor is an adenosine base editor (ABE).

[0115] By “cytidine deaminase” is meant a polypeptide or fragment thereof capable of catalyzing a deamination reaction that converts an amino group to a carbonyl group. In some embodiments the cytidine deaminase has at least about 85% identity to APOBEC or AID. In one embodiment, the cytidine deaminase converts cytosine to uracil or 5-methylcytosine to thymine. PmCDA1, which is derived from Petromyzon marinus (Petromyzon marinus cytosine deaminase 1, “PmCDA1”), AID (Activation-induced cytidine deaminase; AICDA), which is derived from a mammal (e.g., human, swine, bovine, horse, monkey etc.), and APOBEC are exemplary cytidine deaminases.

[0116] In some embodiments, the base editor is a reprogrammable base editor fused to a deaminase (e.g., an adenosine deaminase or cytidine deaminase). In some embodiments, the base editor is a Cas9 fused to a deaminase (e.g., an adenosine deaminase or cytidine deaminase). In some embodiments, the base editor is a nuclease-inactive Cas9 (dCas9) fused to a deaminase (e.g., an adenosine deaminase or cytidine deaminase). In some embodiments, the Cas9 is a circular permutant Cas9 (e.g., spCas9 or saCas9). Circular permutant Cas9s are known in the art and described, for example, in Oakes et al., Cell 176, 254-267, 2019. In some embodiments, the base editor is fused to an inhibitor of base excision repair, for example, a UGI domain, or a dISN domain. In some embodiments, the fusion protein comprises a Cas9 nickase fused to a deaminase and an inhibitor of base excision repair, such as a UGI or dISN domain. In other embodiments, the base editor is an abasic base editor.

[0117] In some embodiments, the base editor is an adenosine base editor (ABE). In some embodiments, an adenosine deaminase is evolved from TadA. In some embodiments, the base editors of the present invention comprise a napDNAbp domain with an internally fused catalytic (e.g., deaminase) domain. In some embodiments, the napDNAbp is a Cas12a (Cpf1) with an internally fused deaminase domain. In some embodiments, the napDNAbp is a Cas12b (c2c1) with an internally fused deaminase domain. In some embodiments, the napDNAbp is a Cas12c (c2c3) with an internally fused deaminase domain. In some embodiments, the napDNAbp is a Cas12d (CasX) with an internally fused deaminase domain. In some embodiments, the napDNAbp is a Cas12e (CasY) with an internally fused deaminase domain. In some embodiments, the napDNAbp is a Cas12g with an internally fused deaminase domain. In some embodiments, the napDNAbp is a Cas12 h with an internally fused deaminase domain. In some embodiments, napDNAbp is a Cas12i with an internally fused deaminase domain. In some embodiments, the base editor is a catalytically dead Cas12 (dCas12) fused to a deaminase domain. In some embodiments, the base editor is a Cas12 nickase (nCas12) fused to a deaminase domain.

[0118] In some embodiments, base editors are generated (e.g., ABE8) by cloning an adenosine deaminase variant (e.g., TadA*8) into a scaffold that includes a circular permutant Cas9 (e.g., spCAS9 or saCAS9) and a bipartite nuclear localization sequence. Circular permutant Cas9s are known in the art and described, for example, in Oakes et al., Cell 176, 254-267, 2019. Exemplary circular permutants follow where the bold sequence indicates sequence derived from Cas9, the italics sequence denotes a linker sequence, and the underlined sequence denotes a bipartite nuclear localization sequence.

[0119] CP5 (with MSP “NGC=Pam Variant with mutations Regular Cas9 likes NGG” PID=Protein Interacting Domain and “D10A” nickase):

(SEQ ID NO: 38)
EIGKATAKYFFYSNIMNFFKTEITLANGEIRKRPL
IETNGETGEIVWDKGRDFATVRKVLSMPQVNIVKK
TEVQTGGFSKESILPKRNSDKLIARKKDWDPKKYG
GFMQPTVAYSVLVVAKVEKGKSKKLKSVKELLGIT
IMERSSFEKNPIDFLEAKGYKEVKKDLIIKLPKYS
LFELENGRKRMLASAKFLQKGNELALPSKYVNFLY
LASHYEKLKGSPEDNEQKQLFVEQHKHYLDEIIEQ
ISEFSKRVILADANLDKVLSAYNKHRDKPIREQAE
NIIHLFTLTNLGAPRAFKYFDTTIARKEYRSTKEV
LDATLIHQSITGLYETRIDLSQLGGDGGSGGSGGS
GGSGGSGGSGGMDKKYSIGLAIGTNSVGWAVITDE
YKVPSKKFKVLGNTDRHSIKKNLIGALLFDSGETA
EATRLKRTARRRYTRRKNRICYLQEIFSNEMAKVD
DSFFHRLEESFLVEEDKKHERHPIFGNIVDEVAYH
EKYPTIYHLRKKLVDSTDKADLRLIYLALAHMIKF
RGHFLIEGDLNPDNSDVDKLFIQLVQTYNQLFEEN
PINASGVDAKAILSARLSKSRRLENLIAQLPGEKK
NGLFGNLIALSLGLTPNFKSNFDLAEDAKLQLSKD
TYDDDLDNLLAQIGDQYADLFLAAKNLSDAILLSD
ILRVNTEITKAPLSASMIKRYDEHHQDLTLLKALV
RQQLPEKYKEIFFDQSKNGYAGYIDGGASQEEFYK
FIKPILEKMDGTEELLVKLNREDLLRKQRTFDNGS
IPHQIHLGELHAILRRQEDFYPFLKDNREKIEKIL
TFRIPYYVGPLARGNSRFAWMTRKSEETITPWNFE
EVVDKGASAQSFIERMTNFDKNLPNEKVLPKHSLL
YEYFTVYNELTKVKYVTEGMRKPAFLSGEQKKAIV
DLLFKTNRKVTVKQLKEDYEKKIECFDSVEISGVE
DRFNASLGTYHDLLKIIKDKDFLDNEENEDILEDI
VLTLTLFEDREMIEERLKTYAHLFDDKVMKQLKRR
RYTGWGRLSRKLINGIRDKQSGKTILDFLKSDGFA
NRNEMQLIHDDSLTFKEDIQKAQVSGQGDSLHEHI
ANLAGSPAIKKGILQTVKVVDELVKVMGRHKPENI
VIEMARENQTTQKGQKNSRERMKRIEEGIKELGSQ
ILKEHPVENTQLQNEKLYLYYLQNGRDMYVDQELD
INRLSDYDVDHIVPQSFLKDDSIDNKVLTRSDKNR
GKSDNVPSEEVVKKMKNYWRQLLNAKLITQRKFDN
LTKAERGGLSELDKAGFIKRQLVETRQITKHVAQI
LDSRMNTKYDENDKLIREVKVITLKSKLVSDFRKD
FQFYKVREINNYHHAHDAYLNAVVGTALIKKYPKL
ESEFVYGDYKVYDVRKMIAKSEQEGADKRTADGSE
FESPKKKRKV*

[0120] In some embodiments, the ABE8 is selected from a base editor from Table 6-9, 13, or 14 infra. In some embodiments, ABE8 contains an adenosine deaminase variant evolved from TadA. In some embodiments, the adenosine deaminase variant of ABE8 is a TadA*8 variant as described in Table 7, 9, 13 or 14 infra. In some embodiments, the adenosine deaminase variant is TadA*7.10 variant (e.g. TadA*8) comprising one or more of an alteration selected from the group of Y147T, Y147R, Q154S, Y123H, V82S, T166R, and/or Q154R. In various embodiments, ABE8 comprises TadA*7.10 variant (e.g. TadA*8) with a combination of alterations selected from the group consisting of Y147T+Q154R; Y147T+Q154S; Y147R+Q154S; V82S+Q154S; V82S+Y147R; V82S+Q154R; V82S+Y123H; I76Y+V82S; V82S+Y123H+Y147T; V82S+Y123H+Y147R; V82S+Y123H+Q154R; Y147R+Q154R+Y123H; Y147R+Q154R+I76Y; Y147R+Q154R+T166R; Y123H+Y147R+Q154R+I76Y; V82S+Y123H+Y147R+Q154R; and I76Y+V82S+Y123H+Y147R+Q154R. In some embodiments ABE8 is a monomeric construct. In some embodiments, ABE8 is a heterodimeric construct. In some embodiments, the ABE8 base editor comprises the sequence:

(SEQ ID NO: 21)
MSEVEFSHEYWMRHALTLAKRARDEREVPVG
AVLVLNNRVIGEGWNRAIGLHDPTAHAEIMA
LRQGGLVMONYRLIDATLYVTFEPCVMCAGA
MIHSRIGRVVFGVRNAKTGAAGSLMDVLHYP
GMNHRVEITEGILADECAALLCTFFRMPRQV
FNAQKKAQSSTD.

[0121] In some embodiments, the polynucleotide programmable DNA binding domain is a CRISPR associated (e.g., Cas or Cpf1) enzyme. In some embodiments, the base editor is a catalytically dead Cas9 (dCas9) fused to a deaminase domain. In some embodiments, the base editor is a Cas9 nickase (nCas9) fused to a deaminase domain. In some embodiments, the base editor is fused to an inhibitor of base excision repair (BER). In some embodiments, the inhibitor of base excision repair is a uracil DNA glycosylase inhibitor (UGI). In some embodiments, the inhibitor of base excision repair is an inosine base excision repair inhibitor.

[0122] Details of base editors are described in International PCT Application Nos. PCT/2017/045381 (WO 2018/027078) and PCT/US2016/058344 (WO 2017/070632), each of which is incorporated herein by reference for its entirety. Also see Komor, A. C., et al., “Programmable editing of a target base in genomic DNA without double-stranded DNA cleavage” Nature 533, 420-424 (2016); Gaudelli, N. M., et al., “Programmable base editing of A•T to G•C in genomic DNA without DNA cleavage” Nature 551, 464-471 (2017); Komor, A. C., et al., “Improved base excision repair inhibition and bacteriophage Mu Gam protein yields C:G-to-T:A base editors with higher efficiency and product purity” Science Advances 3:eaao4774 (2017), and Rees, H. A., et al., “Base editing: precision chemistry on the genome and transcriptome of living cells.” Nat Rev Genet. 2018 December; 19(12):770-788. doi: 10.1038/s41576-018-0059-1, the entire contents of which are hereby incorporated by reference.

[0123] By way of example, a cytidine base editor as used in the base editing compositions, systems and methods described herein has the following nucleic acid sequence (8877 base pairs), (Addgene, Watertown, Mass.; Komor A C, et al., 2017, Sci Adv., 30; 3(8):eaao4774. doi: 10.1126/sciadv.aao4774) as provided below. Polynucleotide sequences having at least 95% or greater identity to the BE4 nucleic acid sequence are also encompassed.

```
(SEQ ID NO: 39)
      1 atatgccaag tacgccccct attgacgtca
          atgacggtaa atggcccgcc tggcattatg
    61 cccagtacat gaccttatgg gactttccta
          cttggcagta catctacgta ttagtcatcg
  121 ctattaccat ggtgatgcgg ttttggcagt
          acatcaatgg gcgtggatag cggtttgact
  181 cacggggatt tccaagtctc caccccattg
          acgtcaatgg gagtttgttt tggcaccaaa
  241 atcaacggga ctttccaaaa tgtcgtaaca
          actccgcccc attgacgcaa atgggcggta
  301 ggcgtgtacg gtgggaggtc tatataagca
          gagctggttt agtgaaccgt cagatccgct
  361 agagatccgc ggccgctaat acgactcact
          atagggagag ccgccaccat gagctcagag
  421 actggcccag tggctgtgga ccccacattg
          agacggcgga tcgagcccca tgagtttgag
  481 gtattcttcg atccgagaga gctccgcaag
          gagacctgcc tgctttacga aattaattgg
  541 gggggccggc actccatttg gcgacataca
          tcacagaaca ctaacaagca cgtcgaagtc
  601 aacttcatcg agaagttcac gacagaaaga
          tatttctgtc cgaacacaag gtgcagcatt
  661 acctggtttc tcagctggag cccatgcggc
          gaatgtagta gggccatcac tgaattcctg
  721 tcaaggtatc cccacgtcac tctgtttatt
          tacatcgcaa ggctgtacca ccacgctgac
  781 ccccgcaatc gacaaggcct gcgggatttg
          atctcttcag gtgtgactat ccaaattatg
  841 actgagcagg agtcaggata ctgctggaga
          aactttgtga attatagccc gagtaatgaa
  901 gcccactggc ctaggtatcc ccatctgtgg
          gtacgactgt acgttcttga actgtactgc
  961 atcatactgg gcctgcctcc ttgtctcaac
          attctgagaa ggaagcagcc acagctgaca
1021 ttctttacca tcgctcttca gtcttgtcat
          taccagcgac tgcccccaca cattctctgg
1081 gccaccgggt tgaaatctgg tggttcttct
          ggtggttcta gcggcagcga gactcccggg
1141 acctcagagt ccgccacacc cgaaagttct
          ggtggttctt ctggtggttc tgataaaaag
1201 tattctattg gtttagccat cggcactaat
          tccgttggat gggctgtcat aaccgatgaa
1261 tacaaagtac cttcaaagaa atttaaggtg
          ttggggaaca cagaccgtca ttcgattaaa
1321 aagaatctta tcggtgccct cctattcgat
          agtggcgaaa cggcagaggc gactcgcctg
1381 aaacgaaccg ctcggagaag gtatacacgt
          cgcaagaacc gaatatgtta cttacaagaa
1441 atttttagca atgagatggc caaagttgac
          gattctttct ttcaccgttt ggaagagtcc
1501 ttccttgtcg aagaggacaa gaaacatgaa
          cggcacccca tctttggaaa catagtagat
1561 gaggtggcat atcatgaaaa gtacccaacg
          atttatcacc tcagaaaaaa gctagttgac
1621 tcaactgata aagcggacct gaggttaatc
          tacttggctc ttgcccatat gataaagttc
1681 cgtgggcact ttctcattga gggtgatcta
          aatccggaca actcggatgt cgacaaactg
1741 ttcatccagt tagtacaaac ctataatcag
          ttgtttgaag agaaccctat aaatgcaagt
1801 ggcgtggatg cgaaggctat tcttagcgcc
          cgcctctcta aatcccgacg gctagaaaac
1861 ctgatcgcac aattacccgg agagaagaaa
          aatgggttgt tcggtaacct tatagcgctc
1921 tcactaggcc tgacaccaaa ttttaagtcg
          aacttcgact tagctgaaga tgccaaattg
1981 cagcttagta aggacacgta cgatgacgat
          ctcgacaatc tactggcaca aattggagat
2041 cagtatgcgg acttattttt ggctgccaaa
          aaccttagcg atgcaatcct cctatctgac
2101 atactgagag ttaatactga gattaccaag
          gcgccgttat ccgcttcaat gatcaaaagg
2161 tacgatgaac atcaccaaga cttgacactt
          ctcaaggccc tagtccgtca gcaactgcct
2221 gagaaatata aggaaatatt ctttgatcag
          tcgaaaaacg ggtacgcagg ttatattgac
2281 ggcggagcga gtcaagagga attctacaag
          tttatcaaac ccatattaga gaagatggat
2341 gggacggaag agttgcttgt aaaactcaat
          cgcgaagatc tactgcgaaa gcagcggact
2401 ttcgacaacg gtagcattcc acatcaaatc
          cacttaggcg aattgcatgc tatacttaga
2461 aggcaggagg atttttatcc gttcctcaaa
          gacaatcgtg aaaagattga gaaaatccta
2521 acctttcgca taccttacta tgtgggaccc
          ctggcccgag ggaactctcg gttcgcatgg
2581 atgacaagaa agtccgaaga aacgattact
          ccatggaatt ttgaggaagt tgtcgataaa
2641 ggtgcgtcag ctcaatcgtt catcgagagg
          atgaccaact ttgacaagaa tttaccgaac
2701 gaaaaagtat tgcctaagca cagtttactt
          tacgagtatt tcacagtgta caatgaactc
2761 acgaaagtta agtatgtcac tgagggcatg
          cgtaaacccg cctttctaag cggagaacag
2821 aagaaagcaa tagtagatct gttattcaag
          accaaccgca aagtgacagt taagcaattg
2881 aaagaggact actttaagaa aattgaatgc
          ttcgattctg tcgagatctc cggggtagaa
2941 gatcgattta atgcgtcact tggtacgtat
          catgacctcc taaagataat taaagataag
3001 gacttcctgg ataacgaaga gaatgaagat
          atcttagaag atatagtgtt gactcttacc
3061 ctctttgaag atcgggaaat gattgaggaa
          agactaaaaa catacgctca cctgttcgac
3121 gataaggtta tgaaacagtt aaagaggcgt
          cgctatacgg gctggggacg attgtcgcgg
3181 aaacttatca acgggataag agacaagcaa
          agtggtaaaa ctattctcga ttttctaaag
3241 agcgacggct tcgccaatag gaactttatg
          cagctgatcc atgatgactc tttaaccttc
3301 aaagaggata tacaaaaggc acaggtttcc
          ggacaagggg actcattgca cgaacatatt
3361 gcgaatcttg ctggttcgcc agccatcaaa
          aagggcatac tccagacagt caaagtagtg
3421 gatgagctag ttaaggtcat gggacgtcac
          aaaccggaaa acattgtaat cgagatggca
3481 cgcgaaaatc aaacgactca gaaggggcaa
          aaaaacagtc gagagcggat gaagagaata
3541 gaagagggta ttaaagaact gggcagccag
          atcttaaagg agcatcctgt ggaaaatacc
3601 caattgcaga acgagaaact ttacctctat
          tacctacaaa atggaaggga catgtatgtt
3661 gatcaggaac tggacataaa ccgtttatct
          gattacgacg tcgatcacat tgtaccccaa
3721 tcctttttga aggacgattc aatcgacaat
          aaagtgctta cacgctcgga taagaaccga
3781 gggaaaagtg acaatgttcc aagcgaggaa
          gtcgtaaaga aaatgaagaa ctattggcgg
3841 cagctcctaa atgcgaaact gataacgcaa
          agaaagttcg ataacttaac taaagctgag
3901 aggggtggct tgtctgaact tgacaaggcc
          ggatttatta aacgtcagct cgtggaaacc
3961 cgccaaatca caaagcatgt tgcacagata
          ctagattccc gaatgaatac gaaatacgac
4021 gagaacgata agctgattcg ggaagtcaaa
          gtaatcactt taaagtcaaa attggtgtcg
4081 gacttcagaa aggattttca attctataaa
          gttagggaga taaataacta ccaccatgcg
4141 cacgacgctt atcttaatgc cgtcgtaggg
          accgcactca ttaagaaata cccgaagcta
4201 gaaagtgagt ttgtgtatgg tgattacaaa
          gtttatgacg tccgtaagat gatcgcgaaa
4261 agcgaacagg agataggcaa ggctacagcc
          aaatacttct tttattctaa cattatgaat
4321 ttctttaaga cggaaatcac tctggcaaac
          ggagagatac gcaaacgacc tttaattgaa
4381 accaatgggg agacaggtga aatcgtatgg
          gataagggcc gggacttcgc gacggtgaga
4441 aaagttttgt ccatgcccca agtcaacata
          gtaaagaaaa ctgaggtgca gaccggaggg
4501 ttttcaaagg aatcgattct tccaaaaagg
          aatagtgata agctcatcgc tcgtaaaaag
4561 gactgggacc cgaaaaagta cggtggcttc
          gatagcccta cagttgccta ttctgtccta
4621 gtagtggcaa aagttgagaa gggaaaatcc
          aagaaactga agtcagtcaa agaattattg
4681 gggataacga ttatggagcg ctcgtctttt
          gaaaagaacc ccatcgactt ccttgaggcg
4741 aaaggttaca aggaagtaaa aaaggatctc
          ataattaaac taccaaagta tagtctgttt
4801 gagttagaaa atggccgaaa acggatgttg
          gctagcgccg gagagcttca aaaggggaac
4861 gaactcgcac taccgtctaa atacgtgaat
          ttcctgtatt tagcgtccca ttacgagaag
4921 ttgaaaggtt cacctgaaga taacgaacag
          aagcaacttt ttgttgagca gcacaaacat
4981 tatctcgacg aaatcataga gcaaatttcg
          gaattcagta agagagtcat cctagctgat
5041 gccaatctgg acaaagtatt aagcgcatac
          aacaagcaca gggataaacc catacgtgag
5101 caggcggaaa atattatcca tttgtttact
          cttaccaacc tcggcgctcc agccgcattc
5161 aagtattttg acacaacgat agatcgcaaa
          cgatacactt ctaccaagga ggtgctagac
5221 gcgacactga ttcaccaatc catcacggga
          ttatatgaaa ctcggataga tttgtcacag
5281 cttgggggtg actctggtgg ttctggagga
          tctggtggtt ctactaatct gtcagatatt
5341 attgaaaagg agaccggtaa gcaactggtt
          atccaggaat ccatcctcat gctcccagag
5401 gaggtggaag aagtcattgg gaacaagccg
          gaaagcgata tactcgtgca caccgcctac
5461 gacgagagca ccgacgagaa tgtcatgctt
          ctgactagcg acgcccctga atacaagcct
5521 tgggctctgg tcatacagga tagcaacggt
          gagaacaaga ttaagatgct ctctggtggt
5581 tctggaggat ctggtggttc tactaatctg
          tcagatatta ttgaaaagga gaccggtaag
5641 caactggtta tccaggaatc catcctcatg
          ctcccagagg aggtggaaga agtcattggg
5701 aacaagccgg aaagcgatat actcgtgcac
          accgcctacg acgagagcac cgacgagaat
5761 gtcatgcttc tgactagcga cgcccctgaa
          tacaagcctt gggctctggt catacaggat
5821 agcaacggtg agaacaagat taagatgctc
          tctggtggtt ctcccaagaa gaagaggaaa
5881 gtctaaccgg tcatcatcac catcaccatt
          gagtttaaac ccgctgatca gcctcgactg
5941 tgccttctag ttgccagcca tctgttgttt
          gcccctcccc cgtgccttcc ttgaccctgg
6001 aaggtgccac tcccactgtc ctttcctaat
          aaaatgagga aattgcatcg cattgtctga
6061 gtaggtgtca ttctattctg gggggtgggg
          tggggcagga cagcaagggg gaggattggg
6121 aagacaatag caggcatgct ggggatgcgg
          tgggctctat ggcttctgag gcggaaagaa
6181 ccagctgggg ctcgataccg tcgacctcta
          gctagagctt ggcgtaatca tggtcatagc
6241 tgtttcctgt gtgaaattgt tatccgctca
          caattccaca caacatacga gccggaagca
6301 taaagtgtaa agcctagggt gcctaatgag
          tgagctaact cacattaatt gcgttgcgct
6361 cactgcccgc tttccagtcg ggaaacctgt
          cgtgccagct gcattaatga atcggccaac
6421 gcgcggggag aggcggtttg cgtattgggc
          gctcttccgc ttcctcgctc actgactcgc
6481 tgcgctcggt cgttcggctg cggcgagcgg
          tatcagctca ctcaaaggcg gtaatacggt
6541 tatccacaga atcaggggat aacgcaggaa
          agaacatgtg agcaaaaggc cagcaaaagg
6601 ccaggaaccg taaaaaggcc gcgttgctgg
          cgtttttcca taggctccgc ccccctgacg
6661 agcatcacaa aaatcgacgc tcaagtcaga
          ggtggcgaaa cccgacagga ctataaagat
6721 accaggcgtt tccccctgga agctccctcg
          tgcgctctcc tgttccgacc ctgccgctta
6781 ccggatacct gtccgccttt ctcccttcgg
          gaagcgtggc gctttctcat agctcacgct
6841 gtaggtatct cagttcggtg taggtcgttc
          gctccaagct gggctgtgtg cacgaacccc
6901 ccgttcagcc cgaccgctgc gccttatccg
          gtaactatcg tcttgagtcc aacccggtaa
6961 gacacgactt atcgccactg gcagcagcca
          ctggtaacag gattagcaga gcgaggtatg
7021 taggcggtgc tacagagttc ttgaagtggt
          ggcctaacta cggctacact agaagaacag
7081 tatttggtat ctgcgctctg ctgaagccag
          ttaccttcgg aaaaagagtt ggtagctctt
7141 gatccggcaa acaaaccacc gctggtagcg
          gtggtttttt tgtttgcaag cagcagatta
7201 cgcgcagaaa aaaaggatct caagaagatc
          ctttgatctt ttctacgggg tctgacgctc
7261 agtggaacga aaactcacgt taagggattt
          tggtcatgag attatcaaaa aggatcttca
7321 cctagatcct tttaaattaa aaatgaagtt
          ttaaatcaat ctaaagtata tatgagtaaa
7381 cttggtctga cagttaccaa tgcttaatca
          gtgaggcacc tatctcagcg atctgtctat
7441 ttcgttcatc catagttgcc tgactccccg
          tcgtgtagat aactacgata cgggagggct
7501 taccatctgg ccccagtgct gcaatgatac
          cgcgagaccc acgctcaccg gctccagatt
7561 tatcagcaat aaaccagcca gccggaaggg
          ccgagcgcag aagtggtcct gcaactttat
7621 ccgcctccat ccagtctatt aattgttgcc
          gggaagctag agtaagtagt tcgccagtta
7681 atagtttgcg caacgttgtt gccattgcta
          caggcatcgt ggtgtcacgc tcgtcgtttg
7741 gtatggcttc attcagctcc ggttcccaac
          gatcaaggcg agttacatga tcccccatgt
7801 tgtgcaaaaa agcggttagc tccttcggtc
          ctccgatcgt tgtcagaagt aagttggccg
7861 cagtgttatc actcatggtt atggcagcac
          tgcataattc tcttactgtc atgccatccg
7921 taagatgctt ttctgtgact ggtgagtact
          caaccaagtc attctgagaa tagtgtatgc
7981 ggcgaccgag ttgctcttgc ccggcgtcaa
          tacgggataa taccgcgcca catagcagaa
8041 ctttaaaagt gctcatcatt ggaaaacgtt
          cttcggggcg aaaactctca aggatcttac
8101 cgctgttgag atccagttcg atgtaaccca
          ctcgtgcacc caactgatct tcagcatctt
8161 ttactttcac cagcgtttct gggtgagcaa
          aaacaggaag gcaaaatgcc gcaaaaaagg
8221 gaataagggc gacacggaaa tgttgaatac
          tcatactctt cctttttcaa tattattgaa
8281 gcatttatca gggttattgt ctcatgagcg
          gatacatatt tgaatgtatt tagaaaaata
8341 aacaaatagg ggttccgcgc acatttcccc
          gaaaagtgcc acctgacgtc gacggatcgg
8401 gagatcgatc tcccgatccc ctagggtcga
          ctctcagtac aatctgctct gatgccgcat
8461 agttaagcca gtatctgctc cctgcttgtg
          tgttggaggt cgctgagtag tgcgcgagca
8521 aaatttaagc tacaacaagg caaggcttga
          ccgacaattg catgaagaat ctgcttaggg
8581 ttaggcgttt tgcgctgctt cgcgatgtac
          gggccagata tacgcgttga cattgattat
8641 tgactagtta ttaatagtaa tcaattacgg
          ggtcattagt tcatagccca tatatggagt
8701 tccgcgttac ataacttacg gtaaatggcc
          cgcctggctg accgcccaac gacccccgcc
8761 cattgacgtc aataatgacg tatgttccca
          tagtaacgcc aatagggact ttccattgac
8821 gtcaatgggt ggagtattta cggtaaactg
          cccacttggc agtacatcaa gtgtatc
BE4 amino acid sequence:
(SEQ ID NO: 40)
MSSETGPVAVDPTLRRRIEPHEFEVFFDPRELR
KETCLLYEINWGGRHSIWRHTSQNTNKHVEVNF
IEKFTTERYFCPNTRCSITWFLSWSPCGECSRA
ITEFLSRYPHVTLFIYIARLYHHADPRNRQGLR
DLISSGVTIQIMTEQESGYCWRNFVNYSPSNEA
HWPRYPHLWVRLYVLELYCIILGLPPCLNILRR
KQPQLTFFTIALQSCHYQRLPPHILWATGLKSG
GSSGGSSGSETPGTSESATPESSGGSSGGSDKK
YSIGLAIGTNSVGWAVITDEYKVPSKKFKVLGN
TDRHSIKKNLIGALLFDSGETAEATRLKRTARR
RYTRRKNRICYLQEIFSNEMAKVDDSFFHRLEE
SFLVEEDKKHERHPIFGNIVDEVAYHEKYPTIY
HLRKKLVDSTDKADLRLIYLALAHMIKFRGHFL
IEGDLNPDNSDVDKLFIQLVQTYNQLFEENPIN
ASGVDAKAILSARLSKSRRLENLIAQLPGEKKN
GLFGNLIALSLGLTPNFKSNFDLAEDAKLQLSK
DTYDDDLDNLLAQIGDQYADLFLAAKNLSDAIL
LSDILRVNTEITKAPLSASMIKRYDEHHQDLTL
LKALVRQQLPEKYKEIFFDQSKNGYAGYIDGGA
SQEEFYKFIKPILEKMDGTEELLVKLNREDLLR
KQRTFDNGSIPHQIHLGELHAILRRQEDFYPFL
KDNREKIEKILTFRIPYYVGPLARGNSRFAWMT
RKSEETITPWNFEEVVDKGASAQSFIERMTNFD
KNLPNEKVLPKHSLLYEYFTVYNELTKVKYVTE
GMRKPAFLSGEQKKAIVDLLFKTNRKVTVKQLK
EDYFKKIECFDSVEISGVEDRFNASLGTYHDLL
KIIKDKDFLDNEENEDILEDIVLTLTLFEDREM
IEERLKTYAHLFDDKVMKQLKRRRYTGWGRLSR
KLINGIRDKQSGKTILDFLKSDGFANRNFMQLI
HDDSLTFKEDIQKAQVSGQGDSLHEHIANLAGS
PAIKKGILQTVKVVDELVKVMGRHKPENIVIEM
ARENQTTQKGQKNSRERMKRIEEGIKELGSQIL
KEHPVENTQLQNEKLYLYYLQNGRDMYVDQELD
INRLSDYDVDHIVPQSFLKDDSIDNKVLTRSDK
NRGKSDNVPSEEVVKKMKNYWRQLLNAKLITQR
KFDNLTKAERGGLSELDKAGFIKRQLVETRQIT
KHVAQILDSRMNTKYDENDKLIREVKVITLKSK
LVSDFRKDFQFYKVREINNYHHAHDAYLNAVVG
TALIKKYPKLESEFVYGDYKVYDVRKMIAKSEQ
EIGKATAKYFFYSNIMNFFKTEITLANGEIRKR
PLIETNGETGEIVWDKGRDFATVRKVLSMPQVN
IVKKTEVOTGGFSKESILPKRNSDKLIARKKDW
DPKKYGGFDSPTVAYSVLVVAKVEKGKSKKLKS
VKELLGITIMERSSFEKNPIDFLEAKGYKEVKK
DLIIKLPKYSLFELENGRKRMLASAGELQKGNE
LALPSKYVNFLYLASHYEKLKGSPEDNEQKQLF
VEQHKHYLDEIIEQISEFSKRVILADANLDKVL
SAYNKHRDKPIREQAENIIHLFTLTNLGAPAAF
KYFDTTIDRKRYTSTKEVLDATLIHQSITGLYE
TRIDLSQLGGDSGGSGGSGGSTNLSDIIEKETG
KQLVIQESILMLPEEVEEVIGNKPESDILVHTA
YDESTDENVMLLTSDAPEYKPWALVIQDSNGEN
KIKMLSGGSGGSGGSTNLSDIIEKETGKQLVIQ
ESILMLPEEVEEVIGNKPESDILVHTAYDESTD
ENVMLLTSDAPEYKPWALVIQDSNGENKIKMLS
GGSPKKKRK
```

[0124] By way of example, the adenine base editor (ABE) as used in the base editing compositions, systems and methods described herein has the nucleic acid sequence (8877 base pairs), (Addgene, Watertown, Mass.; Gaudelli N M, et al., Nature. 2017 Nov. 23; 551(7681):464-471. doi: 10.1038/nature24644; Koblan L W, et al., Nat Biotechnol. 2018 October; 36(9):843-846. doi: 10.1038/nbt.4172.) as provided below. Polynucleotide sequences having at least 95% or greater identity to the ABE nucleic acid sequence are also encompassed.

(SEQ ID NO: 41)
ATATGCCAAGTACGCCCCCTATTGACGTCAATGACG
GTAAATGGCCCGCCTGGCATTATGCCCAGTACATG
ACCTTATGGGACTTTCCTACTTGGCAGTACATCTA
CGTATTAGTCATCGCTATTACCATGGTGATGCGGT
TTTGGCAGTACATCAATGGGCGTGGATAGCGGTTT
GACTCACGGGGATTTCCAAGTCTCCACCCCATTGA
CGTCAATGGGAGTTTGTTTTGGCACCAAAATCAAC
GGGACTTTCCAAAATGTCGTAACAACTCCGCCCCA
TTGACGCAAATGGGCGGTAGGCGTGTACGGTGGGA
GGTCTATATAAGCAGAGCTGGTTTAGTGAACCGTC
AGATCCGCTAGAGATCCGCGGCCGCTAATACGACT
CACTATAGGGAGAGCCGCCACCATGAAACGGACAG
CCGACGGAAGCGAGTTCGAGTCACCAAAGAAGAAG
CGGAAAGTCTCTGAAGTCGAGTTTAGCCACGAGTA
TTGGATGAGGCACGCACTGACCCTGGCAAAGCGAG
CATGGGATGAAAGAGAAGTCCCCGTGGGCGCCGTG
CTGGTGCACAACAATAGAGTGATCGGAGAGGGATG
GAACAGGCCAATCGGCCGCCACGACCCTACCGGAC
ACGCAGAGATCATGGCACTGAGGCAGGGAGGCCTG
GTCATGCAGAATTACCGCCTGATCGATGCCACCCT
GTATGTGACACTGGAGCCATGCGTGATGTGCGCAG
GAGCAATGATCCACAGCAGGATCGGAAGAGTGGTG
TTCGGAGCACGGGACGCCAAGACCGGCGCAGCAGG
CTCCCTGATGGATGTGCTGCACCACCCCGGCATGA
ACCACCGGGTGGAGATCACAGAGGGAATCCTGGCA
GACGAGTGCGCCGCCCTGCTGAGCGATTTCTTTAG
AATGCGGAGACAGGAGATCAAGGCCCAGAAGAAGG
CACAGAGCTCCACCGACTCTGGAGGATCTAGCGGA
GGATCCTCTGGAAGCGAGACACCAGGCACAAGCGA
GTCCGCCACACCAGAGAGCTCCGGCGGCTCCTCCG
GAGGATCCTCTGAGGTGGAGTTTTCCCACGAGTAC
TGGATGAGACATGCCCTGACCCTGGCCAAGAGGGC
ACGCGATGAGAGGGAGGTGCCTGTGGGAGCCGTGC
TGGTGCTGAACAATAGAGTGATCGGCGAGGGCTGG
AACAGAGCCATCGGCCTGCACGACCCAACAGCCCA
TGCCGAAATTATGGCCCTGAGACAGGGCGGCCTGG
TCATGCAGAACTACAGACTGATTGACGCCACCCTG
TACGTGACATTCGAGCCTTGCGTGATGTGCGCCGG
CGCCATGATCCACTCTAGGATCGGCCGCGTGGTGT
TTGGCGTGAGGAACGCAAAAACCGGCGCCGCAGGC
TCCCTGATGGACGTGCTGCACTACCCCGGCATGAA
TCACCGCGTCGAAATTACCGAGGGAATCCTGGCAG
ATGAATGTGCCGCCCTGCTGTGCTATTTCTTTCGG
ATGCCTAGACAGGTGTTCAATGCTCAGAAGAAGGC
CCAGAGCTCCACCGACTCCGGAGGATCTAGCGGAG
GCTCCTCTGGCTCTGAGACACCTGGCACAAGCGAG
AGCGCAACACCTGAAAGCAGCGGGGGCAGCAGCGG
GGGGTCAGACAAGAAGTACAGCATCGGCCTGGCCA
TCGGCACCAACTCTGTGGGCTGGGCCGTGATCACC
GACGAGTACAAGGTGCCCAGCAAGAAATTCAAGGT
GCTGGGCAACACCGACCGGCACAGCATCAAGAAGA
ACCTGATCGGAGCCCTGCTGTTCGACAGCGGCGAA
ACAGCCGAGGCCACCCGGCTGAAGAGAACCGCCAG
AAGAAGATACACCAGACGGAAGAACCGGATCTGCT
ATCTGCAAGAGATCTTCAGCAACGAGATGGCCAAG
GTGGACGACAGCTTCTTCCACAGACTGGAAGAGTC
CTTCCTGGTGGAAGAGGATAAGAAGCACGAGCGGC
ACCCCATCTTCGGCAACATCGTGGACGAGGTGGCC
TACCACGAGAAGTACCCCACCATCTACCACCTGAG
AAAGAAACTGGTGGACAGCACCGACAAGGCCGACC
TGCGGCTGATCTATCTGGCCCTGGCCCACATGATC
AAGTTCCGGGGCCACTTCCTGATCGAGGGCGACCT
GAACCCCGACAACAGCGACGTGGACAAGCTGTTCA
TCCAGCTGGTGCAGACCTACAACCAGCTGTTCGAG
GAAAACCCCATCAACGCCAGCGGCGTGGACGCCAA
GGCCATCCTGTCTGCCAGACTGAGCAAGAGCAGAC
GGCTGGAAAATCTGATCGCCCAGCTGCCCGGCGAG
AAGAAGAATGGCCTGTTCGGAAACCTGATTGCCCT
GAGCCTGGGCCTGACCCCCAACTTCAAGAGCAACT
TCGACCTGGCCGAGGATGCCAAACTGCAGCTGAGC
AAGGACACCTACGACGACGACCTGGACAACCTGCT
GGCCCAGATCGGCGACCAGTACGCCGACCTGTTTC
TGGCCGCCAAGAACCTGTCCGACGCCATCCTGCTG
AGCGACATCCTGAGAGTGAACACCGAGATCACCAA
GGCCCCCCTGAGCGCCTCTATGATCAAGAGATACG
ACGAGCACCACCAGGACCTGACCCTGCTGAAAGCT
CTCGTGCGGCAGCAGCTGCCTGAGAAGTACAAAGA
GATTTTCTTCGACCAGAGCAAGAACGGCTACGCCG
GCTACATTGACGGCGGAGCCAGCCAGGAAGAGTTC
TACAAGTTCATCAAGCCCATCCTGGAAAAGATGGA
CGGCACCGAGGAACTGCTCGTGAAGCTGAACAGAG
AGGACCTGCTGCGGAAGCAGCGGACCTTCGACAAC
GGCAGCATCCCCCACCAGATCCACCTGGGAGAGCT
GCACGCCATTCTGCGGCGGCAGGAAGATTTTTACC
CATTCCTGAAGGACAACCGGGAAAAGATCGAGAAG
ATCCTGACCTTCCGCATCCCCTACTACGTGGGCCC
TCTGGCCAGGGGAAACAGCAGATTCGCCTGGATGA
CCAGAAAGAGCGAGGAAACCATCACCCCCTGGAAC
TTCGAGGAAGTGGTGGACAAGGGCGCTTCCGCCCA
GAGCTTCATCGAGCGGATGACCAACTTCGATAAGA
ACCTGCCCAACGAGAAGGTGCTGCCCAAGCACAGC
CTGCTGTACGAGTACTTCACCGTGTATAACGAGCT
GACCAAAGTGAAATACGTGACCGAGGGAATGAGAA
AGCCCGCCTTCCTGAGCGGCGAGCAGAAAAAGGCC
ATCGTGGACCTGCTGTTCAAGACCAACCGGAAAGT
GACCGTGAAGCAGCTGAAAGAGGACTACTTCAAGA
AAATCGAGTGCTTCGACTCCGTGGAAATCTCCGGC
GTGGAAGATCGGTTCAACGCCTCCCTGGGCACATA
CCACGATCTGCTGAAAATTATCAAGGACAAGGACT
TCCTGGACAATGAGGAAAACGAGGACATTCTGGAA
GATATCGTGCTGACCCTGACACTGTTTGAGGACAG
AGAGATGATCGAGGAACGGCTGAAAACCTATGCCC
ACCTGTTCGACGACAAAGTGATGAAGCAGCTGAAG
CGGCGGAGATACACCGGCTGGGGCAGGCTGAGCCG
GAAGCTGATCAACGGCATCCGGGACAAGCAGTCCG
GCAAGACAATCCTGGATTTCCTGAAGTCCGACGGC
TTCGCCAACAGAAACTTCATGCAGCTGATCCACGA
CGACAGCCTGACCTTTAAAGAGGACATCCAGAAAG
CCCAGGTGTCCGGCCAGGGCGATAGCCTGCACGAG
CACATTGCCAATCTGGCCGGCAGCCCCGCCATTAA
GAAGGGCATCCTGCAGACAGTGAAGGTGGTGGACG
AGCTCGTGAAAGTGATGGGCCGGCACAAGCCCGAG
AACATCGTGATCGAAATGGCCAGAGAGAACCAGAC
CACCCAGAAGGGACAGAAGAACAGCCGCGAGAGAA
TGAAGCGGATCGAAGAGGGCATCAAAGAGCTGGGC
AGCCAGATCCTGAAAGAACACCCCGTGGAAAACAC
CCAGCTGCAGAACGAGAAGCTGTACCTGTACTACC
TGCAGAATGGGCGGGATATGTACGTGGACCAGGAA
CTGGACATCAACCGGCTGTCCGACTACGATGTGGA
CCATATCGTGCCTCAGAGCTTTCTGAAGGACGACT
CCATCGACAACAAGGTGCTGACCAGAAGCGACAAG
AACCGGGGCAAGAGCGACAACGTGCCCTCCGAAGA
GGTCGTGAAGAAGATGAAGAACTACTGGCGGCAGC
TGCTGAACGCCAAGCTGATTACCCAGAGAAAGTTC
GACAATCTGACCAAGGCCGAGAGAGGCGGCCTGAG
CGAACTGGATAAGGCCGGCTTCATCAAGAGACAGC
TGGTGGAAACCCGGCAGATCACAAAGCACGTGGCA
CAGATCCTGGACTCCCGGATGAACACTAAGTACGA
CGAGAATGACAAGCTGATCCGGGAAGTGAAAGTGA
TCACCCTGAAGTCCAAGCTGGTGTCCGATTTCCGG
AAGGATTTCCAGTTTTACAAAGTGCGCGAGATCAA
CAACTACCACCACGCCCACGACGCCTACCTGAACG
CCGTCGTGGGAACCGCCCTGATCAAAAAGTACCCT
AAGCTGGAAAGCGAGTTCGTGTACGGCGACTACAA
GGTGTACGACGTGCGGAAGATGATCGCCAAGAGCG
AGCAGGAAATCGGCAAGGCTACCGCCAAGTACTTC
TTCTACAGCAACATCATGAACTTTTTCAAGACCGA
GATTACCCTGGCCAACGGCGAGATCCGGAAGCGGC
CTCTGATCGAGACAAACGGCGAAACCGGGGAGATC
GTGTGGGATAAGGGCCGGGATTTTGCCACCGTGCG
GAAAGTGCTGAGCATGCCCCAAGTGAATATCGTGA
AAAAGACCGAGGTGCAGACAGGCGGCTTCAGCAAA
GAGTCTATCCTGCCCAAGAGGAACAGCGATAAGCT
GATCGCCAGAAAGAAGGACTGGGACCCTAAGAAGT
ACGGCGGCTTCGACAGCCCCACCGTGGCCTATTCT
GTGCTGGTGGTGGCCAAAGTGGAAAAGGGCAAGTC
CAAGAAACTGAAGAGTGTGAAAGAGCTGCTGGGGA
TCACCATCATGGAAAGAAGCAGCTTCGAGAAGAAT
CCCATCGACTTTCTGGAAGCCAAGGGCTACAAAGA
AGTGAAAAAGGACCTGATCATCAAGCTGCCTAAGT
ACTCCCTGTTCGAGCTGGAAAACGGCCGGAAGAGA
ATGCTGGCCTCTGCCGGCGAACTGCAGAAGGGAAA
CGAACTGGCCCTGCCCTCCAAATATGTGAACTTCC
TGTACCTGGCCAGCCACTATGAGAAGCTGAAGGGC
TCCCCCGAGGATAATGAGCAGAAACAGCTGTTTGT
GGAACAGCACAAGCACTACCTGGACGAGATCATCG
AGCAGATCAGCGAGTTCTCCAAGAGAGTGATCCTG
GCCGACGCTAATCTGGACAAAGTGCTGTCCGCCTA
CAACAAGCACCGGGATAAGCCCATCAGAGAGCAGG
CCGAGAATATCATCCACCTGTTTACCCTGACCAAT
CTGGGAGCCCCTGCCGCCTTCAAGTACTTTGACAC
CACCATCGACCGGAAGAGGTACACCAGCACCAAAG
AGGTGCTGGACGCCACCCTGATCCACCAGAGCATC
ACCGGCCTGTACGAGACACGGATCGACCTGTCTCA
GCTGGGAGGTGACTCTGGCGGCTCAAAAAGAACCG
CCGACGGCAGCGAATTCGAGCCCAAGAAGAAGAGG
AAAGTCTAACCGGTCATCATCACCATCACCATTGA
GTTTAAACCCGCTGATCAGCCTCGACTGTGCCTTC
TAGTTGCCAGCCATCTGTTGTTTGCCCCTCCCCCG
TGCCTTCCTTGACCCTGGAAGGTGCCACTCCCACT
GTCCTTTCCTAATAAAATGAGGAAATTGCATCGCA
TTGTCTGAGTAGGTGTCATTCTATTCTGGGGGGTG
GGGTGGGGCAGGACAGCAAGGGGGAGGATTGGGAA
GACAATAGCAGGCATGCTGGGGATGCGGTGGGCTC
TATGGCTTCTGAGGCGGAAAGAACCAGCTGGGGCT
CGATACCGTCGACCTCTAGCTAGAGCTTGGCGTAA
TCATGGTCATAGCTGTTTCCTGTGTGAAATTGTTA
TCCGCTCACAATTCCACACAACATACGAGCCGGAA
GCATAAAGTGTAAAGCCTAGGGTGCCTAATGAGTG
AGCTAACTCACATTAATTGCGTTGCGCTCACTGCC
CGCTTTCCAGTCGGGAAACCTGTCGTGCCAGCTGC
ATTAATGAATCGGCCAACGCGCGGGGAGAGGCGGT
TTGCGTATTGGGCGCTCTTCCGCTTCCTCGCTCAC
TGACTCGCTGCGCTCGGTCGTTCGGCTGCGGCGAG
CGGTATCAGCTCACTCAAAGGCGGTAATACGGTTA
TCCACAGAATCAGGGGATAACGCAGGAAAGAACAT
GTGAGCAAAAGGCCAGCAAAAGGCCAGGAACCGTA
AAAAGGCCGCGTTGCTGGCGTTTTTCCATAGGCTC
CGCCCCCCTGACGAGCATCACAAAAATCGACGCTC
AAGTCAGAGGTGGCGAAACCCGACAGGACTATAAA
GATACCAGGCGTTTCCCCCTGGAAGCTCCCTCGTG
CGCTCTCCTGTTCCGACCCTGCCGCTTACCGGATA
CCTGTCCGCCTTTCTCCCTTCGGGAAGCGTGGCGC
TTTCTCATAGCTCACGCTGTAGGTATCTCAGTTCG
GTGTAGGTCGTTCGCTCCAAGCTGGGCTGTGTGCA
CGAACCCCCCGTTCAGCCCGACCGCTGCGCCTTAT
CCGGTAACTATCGTCTTGAGTCCAACCCGGTAAGA
CACGACTTATCGCCACTGGCAGCAGCCACTGGTAA
CAGGATTAGCAGAGCGAGGTATGTAGGCGGTGCTA
CAGAGTTCTTGAAGTGGTGGCCTAACTACGGCTAC
ACTAGAAGAACAGTATTTGGTATCTGCGCTCTGCT
GAAGCCAGTTACCTTCGGAAAAAGAGTTGGTAGCT
CTTGATCCGGCAAACAAACCACCGCTGGTAGCGGT
GGTTTTTTTGTTTGCAAGCAGCAGATTACGCGGAG
AAAAAAAGGATCTCAAGAAGATCCTTTGATCTTTT
CTACGGGGTCTGACACTCAGTGGAACGAAAACTCA
CGTTAAGGGATTTTGGTCATGAGATTATCAAAAAG
GATCTTCACCTAGATCCTTTTAAATTAAAAATGAA
GTTTTAAATCAATCTAAAGTATATATGAGTAAACT
TGGTCTGACAGTTACCAATGCTTAATCAGTGAGGC
ACCTATCTCAGCGATCTGTCTATTTCGTTCATCCA
TAGTTGCCTGACTCCCCGTCGTGTAGATAACTACG
ATACGGGAGGGCTTACCATCTGGCCCCAGTGCTGC
AATGATACCGCGAGACCCACGCTCACCGGCTCCAG
ATTTATCAGCAATAAACCAGCCAGCCGGAAGGGCC
GAGCGCAGAAGTGGTCCTGCAACTTTATCCGCCTC
CATCCAGTCTATTAATTGTTGCCGGGAAGCTAGAG
TAAGTAGTTCGCCAGTTAATAGTTTGCGCAACGTT
GTTGCCATTGCTACAGGCATCGTGGTGTCACGCTC
GTCGTTTGGTATGGCTTCATTCAGCTCCGGTTCCC
AACGATCAAGGCGAGTTACATGATCCCCCATGTTG
TGCAAAAAAGCGGTTAGCTCCTTCGGTCCTCCGAT
CGTTGTCAGAAGTAAGTTGGCCGCAGTGTTATCAC
TCATGGTTATGGCAGCACTGCATAATTCTCTTACT
GTCATGCCATCCGTAAGATGCTTTTCTGTGACTGG
TGAGTACTCAACCAAGTCATTCTGAGAATAGTGTA
TGCGGCGACCGAGTTGCTCTTGCCCGGCGTCAATA
CGGGATAATACCGCGCCACATAGCAGAACTTTAAA
AGTGCTCATCATTGGAAAACGTTCTTCGGGGCGAA
AACTCTCAAGGATCTTACCGCTGTTGAGATCCAGT
TCGATGTAACCCACTCGTGCACCCAACTGATCTTC
AGCATCTTTTACTTTCACCAGCGTTTCTGGGTGAG
CAAAAACAGGAAGGCAAAATGCCGCAAAAAAGGGA
ATAAGGGCGACACGGAAATGTTGAATACTCATACT
CTTCCTTTTTCAATATTATTGAAGCATTTATCAGG
GTTATTGTCTCATGAGCGGATACATATTTGAATGT
ATTTAGAAAAATAAACAAATAGGGGTTCCGCGCAC
ATTTCCCCGAAAAGTGCCACCTGACGTCGACGGAT
CGGGAGATCGATCTCCCGATCCCCTAGGGTCGACT
CTCAGTACAATCTGCTCTGATGCCGCATAGTTAAG
CCAGTATCTGCTCCCTGCTTGTGTGTTGGAGGTCG
CTGAGTAGTGCGCGAGCAAAATTTAAGCTACAACA
AGGCAAGGCTTGACCGACAATTGCATGAAGAATCT
GCTTAGGGTTAGGCGTTTTGCGCTGCTTCGCGATG
TACGGGCCAGATATACGCGTTGACATTGATTATTG
ACTAGTTATTAATAGTAATCAATTACGGGGTCATT
AGTTCATAGCCCATATATGGAGTTCCGCGTTACAT
AACTTACGGTAAATGGCCCGCCTGGCTGACCGCCC
AACGACCCCCGCCCATTGACGTCAATAATGACGTA
TGTTCCCATAGTAACGCCAATAGGGACTTTCCATT
GACGTCAATGGGTGGAGTATTTACGGTAAACTGCC
CACTTGGCAGTACATCAAGTGTATC

[0125] By “base editing activity” is meant acting to chemically alter a base within a polynucleotide. In one embodiment, a first base is converted to a second base. In one embodiment, the base editing activity is cytidine deaminase activity, e.g., converting target C•G to T•A. In another embodiment, the base editing activity is adenosine or adenine deaminase activity, e.g., converting A•T to G•C. In another embodiment, the base editing activity is cytidine deaminase activity, e.g., converting target C•G to T•A and adenosine or adenine deaminase activity, e.g., converting A•T to G•C. In some embodiments, base editing activity is assessed by efficiency of editing. Base editing efficiency may be measured by any suitable means, for example, by sanger sequencing or next generation sequencing. In some embodiments, base editing efficiency is measured by percentage of total sequencing reads with nucleobase conversion effected by the base editor, for example, percentage of total sequencing reads with target A•T base pair converted to a G•C base pair. In some embodiments, base editing efficiency is measured by percentage of total cells with nucleobase conversion effected by the abse editor, when base editing is performed in a population of cells.

[0126] The term “base editor system” refers to a system for editing a nucleobase of a target nucleotide sequence. In various embodiments, the base editor system comprises (1) a polynucleotide programmable nucleotide binding domain (e.g., Cas9); (2) a deaminase domain (e.g., an adenosine deaminase or a cytidine deaminase) for deaminating said nucleobase; and (3) one or more guide polynucleotide (e.g., guide RNA). In some embodiments, the polynucleotide programmable nucleotide binding domain is a polynucleotide programmable DNA binding domain. In some embodiments, the base editor is an adenine or adenosine base editor (ABE). In some embodiments, the base editor system is ABE8.

[0127] In some embodiments, a base editor system may comprise more than one base editing component. For example, a base editor system may include more than one deaminase. In some embodiments, a base editor system may include one or more adenosine deaminases. In some embodiments, a single guide polynucleotide may be utilized to target different deaminases to a target nucleic acid sequence. In some embodiments, a single pair of guide polynucleotides may be utilized to target different deaminases to a target nucleic acid sequence.

[0128] The deaminase domain and the polynucleotide programmable nucleotide binding component of a base editor system may be associated with each other covalently or non-covalently, or any combination of associations and interactions thereof. For example, in some embodiments, a deaminase domain can be targeted to a target nucleotide sequence by a polynucleotide programmable nucleotide binding domain. In some embodiments, a polynucleotide programmable nucleotide binding domain can be fused or linked to a deaminase domain. In some embodiments, a polynucleotide programmable nucleotide binding domain can target a deaminase domain to a target nucleotide sequence by non-covalently interacting with or associating with the deaminase domain. For example, in some embodiments, the deaminase domain can comprise an additional heterologous portion or domain that is capable of interacting with, associating with, or capable of forming a complex with an additional heterologous portion or domain that is part of a polynucleotide programmable nucleotide binding domain. In some embodiments, the additional heterologous portion may be capable of binding to, interacting with, associating with, or forming a complex with a polypeptide. In some embodiments, the additional heterologous portion may be capable of binding to, interacting with, associating with, or forming a complex with a polynucleotide. In some embodiments, the additional heterologous portion may be capable of binding to a guide polynucleotide. In some embodiments, the additional heterologous portion may be capable of binding to a polypeptide linker. In some embodiments, the additional heterologous portion may be capable of binding to a polynucleotide linker. The additional heterologous portion may be a protein domain. In some embodiments, the additional heterologous portion may be a K Homology (KH) domain, a MS2 coat protein domain, a PP7 coat protein domain, a SfMu Com coat protein domain, a steril alpha motif, a telomerase Ku binding motif and Ku protein, a telomerase Sm7 binding motif and Sm7 protein, or an RNA recognition motif.

[0129] A base editor system may further comprise a guide polynucleotide component. It should be appreciated that components of the base editor system may be associated with each other via covalent bonds, noncovalent interactions, or any combination of associations and interactions thereof. In some embodiments, a deaminase domain can be targeted to a target nucleotide sequence by a guide polynucleotide. For example, in some embodiments, the deaminase domain can comprise an additional heterologous portion or domain (e.g., polynucleotide binding domain such as an RNA or DNA binding protein) that is capable of interacting with, associating with, or capable of forming a complex with a portion or segment (e.g., a polynucleotide motif) of a guide polynucleotide. In some embodiments, the additional heterologous portion or domain (e.g., polynucleotide binding domain such as an RNA or DNA binding protein) can be fused or linked to the deaminase domain. In some embodiments, the additional heterologous portion may be capable of binding to, interacting with, associating with, or forming a complex with a polypeptide. In some embodiments, the additional heterologous portion may be capable of binding to, interacting with, associating with, or forming a complex with a polynucleotide. In some embodiments, the additional heterologous portion may be capable of binding to a guide polynucleotide. In some embodiments, the additional heterologous portion may be capable of binding to a polypeptide linker. In some embodiments, the additional heterologous portion may be capable of binding to a polynucleotide linker. The additional heterologous portion may be a protein domain. In some embodiments, the additional heterologous portion may be a K Homology (KH) domain, a MS2 coat protein domain, a PP7 coat protein domain, a SfMu Com coat protein domain, a sterile alpha motif, a telomerase Ku binding motif and Ku protein, a telomerase Sm7 binding motif and Sm7 protein, or an RNA recognition motif.

[0130] In some embodiments, a base editor system can further comprise an inhibitor of base excision repair (BER) component. It should be appreciated that components of the base editor system may be associated with each other via covalent bonds, noncovalent interactions, or any combination of associations and interactions thereof. The inhibitor of BER component may comprise a BER inhibitor. In some embodiments, the inhibitor of BER can be a uracil DNA glycosylase inhibitor (UGI). In some embodiments, the inhibitor of BER can be an inosine BER inhibitor. In some embodiments, the inhibitor of BER can be targeted to the target nucleotide sequence by the polynucleotide programmable nucleotide binding domain. In some embodiments, a polynucleotide programmable nucleotide binding domain can be fused or linked to an inhibitor of BER. In some embodiments, a polynucleotide programmable nucleotide binding domain can be fused or linked to a deaminase domain and an inhibitor of BER. In some embodiments, a polynucleotide programmable nucleotide binding domain can target an inhibitor of BER to a target nucleotide sequence by non-covalently interacting with or associating with the inhibitor of BER. For example, in some embodiments, the inhibitor of BER component can comprise an additional heterologous portion or domain that is capable of interacting with, associating with, or capable of forming a complex with an additional heterologous portion or domain that is part of a polynucleotide programmable nucleotide binding domain.

[0131] In some embodiments, the inhibitor of BER can be targeted to the target nucleotide sequence by the guide polynucleotide. For example, in some embodiments, the inhibitor of BER can comprise an additional heterologous portion or domain (e.g., polynucleotide binding domain such as an RNA or DNA binding protein) that is capable of interacting with, associating with, or capable of forming a complex with a portion or segment (e.g., a polynucleotide motif) of a guide polynucleotide. In some embodiments, the additional heterologous portion or domain of the guide polynucleotide (e.g., polynucleotide binding domain such as an RNA or DNA binding protein) can be fused or linked to the inhibitor of BER. In some embodiments, the additional heterologous portion may be capable of binding to, interacting with, associating with, or forming a complex with a polynucleotide. In some embodiments, the additional heterologous portion may be capable of binding to a guide polynucleotide. In some embodiments, the additional heterologous portion may be capable of binding to a polypeptide linker. In some embodiments, the additional heterologous portion may be capable of binding to a polynucleotide linker. The additional heterologous portion may be a protein domain. In some embodiments, the additional heterologous portion may be a K Homology (KH) domain, a MS2 coat protein domain, a PP7 coat protein domain, a SfMu Com coat protein domain, a sterile alpha motif, a telomerase Ku binding motif and Ku protein, a telomerase Sm7 binding motif and Sm7 protein, or an RNA recognition motif.

[0132] The term “Cas9” or “Cas9 domain” refers to an RNA guided nuclease comprising a Cas9 protein, or a fragment thereof (e.g., a protein comprising an active, inactive, or partially active DNA cleavage domain of Cas9, and/or the gRNA binding domain of Cas9). A Cas9 nuclease is also referred to sometimes as a Casnl nuclease or a CRISPR (clustered regularly interspaced short palindromic repeat) associated nuclease. CRISPR is an adaptive immune system that provides protection against mobile genetic elements (viruses, transposable elements and conjugative plasmids). CRISPR clusters contain spacers, sequences complementary to antecedent mobile elements, and target invading nucleic acids. CRISPR clusters are transcribed and processed into CRISPR RNA (crRNA). In type II CRISPR systems correct processing of pre-crRNA requires a trans-encoded small RNA (tracrRNA), endogenous ribonuclease 3 (rnc) and a Cas9 protein. The tracrRNA serves as a guide for ribonuclease 3-aided processing of pre-crRNA. Subsequently, Cas9/crRNA/tracrRNA endonucleolytically cleaves linear or circular dsDNA target complementary to the spacer. The target strand not complementary to crRNA is first cut endonucleolytically, then trimmed 3′-5′ exonucleolytically. In nature, DNA-binding and cleavage typically requires protein and both RNAs. However, single guide RNAs (“sgRNA”, or simply “gNRA”) can be engineered so as to incorporate aspects of both the crRNA and tracrRNA into a single RNA species. See, e.g., Jinek M., et al., Science 337:816-821(2012), the entire contents of which is hereby incorporated by reference. Cas9 recognizes a short motif in the CRISPR repeat sequences (the PAM or protospacer adjacent motif) to help distinguish self versus non-self. Cas9 nuclease sequences and structures are well known to those of skill in the art (see, e.g., “Complete genome sequence of an M1 strain of Streptococcus pyogenes.” Ferretti et al., Proc. Natl. Acad. Sci. U.S.A. 98:4658-4663(2001); “CRISPR RNA maturation by trans-encoded small RNA and host factor RNase III.” Deltcheva E., et al., Nature 471:602-607(2011); and “A programmable dual-RNA-guided DNA endonuclease in adaptive bacterial immunity.” Jinek M., et al., Science 337:816-821(2012), the entire contents of each of which are incorporated herein by reference). Cas9 orthologs have been described in various species, including, but not limited to, S. pyogenes and S. thermophilus. Additional suitable Cas9 nucleases and sequences will be apparent to those of skill in the art based on this disclosure, and such Cas9 nucleases and sequences include Cas9 sequences from the organisms and loci disclosed in Chylinski, Rhun, and Charpentier, “The tracrRNA and Cas9 families of type II CRISPR-Cas immunity systems” (2013) RNA Biology 10:5, 726-737; the entire contents of which are incorporated herein by reference.

[0133] An exemplary Cas9, is Streptococcus pyogenes Cas9 (spCas9), the amino acid sequence of which is provided below:

(SEQ ID NO: 42)
MDKKYSIGLDIGTNSVGWAVITDDYKVPSKKFKVL
GNTDRHSIKKNLIGALLFGSGETAEATRLKRTARR
RYTRRKNRICYLQEIFSNEMAKVDDSFFHRLEESF
LVEEDKKHERHPIFGNIVDEVAYHEKYPTIYHLRK
KLADSTDKADLRLIYLALAHMIKFRGHFLIEGDLN
PDNSDVDKLFIQLVQIYNQLFEENPINASRVDAKA
ILSARLSKSRRLENLIAQLPGEKRNGLFGNLIALS
LGLTPNFKSNFDLAEDAKLQLSKDTYDDDLDNLLA
QIGDQYADLFLAAKNLSDAILLSDILRVNSEITKA
PLSASMIKRYDEHHQDLTLLKALVRQQLPEKYKEI
FFDQSKNGYAGYIDGGASQEEFYKFIKPILEKMDG
TEELLVKLNREDLLRKQRTFDNGSIPHQIHLGELH
AILRRQEDFYPFLKDNREKIEKILTFRIPYYVGPL
ARGNSRFAWMTRKSEETITPWNFEEVVDKGASAQS
FIERMTNFDKNLPNEKVLPKHSLLYEYFTVYNELT
KVKYVTEGMRKPAFLSGEQKKAIVDLLFKTNRKVT
VKQLKEDYFKKIECFDSVEISGVEDRFNASLGAYH
DLLKIIKDKDFLDNEENEDILEDIVLTLTLFEDRG
MIEERLKTYAHLFDDKVMKQLKRRRYTGWGRLSRK
LINGIRDKQSGKTILDFLKSDGFANRNFMQLIHDD
SLTFKEDIQKAQVSGQGHSLHEQIANLAGSPAIKK
GILQTVKIVDELVKVMGHKPENIVIEMARENQTTQ
KGQKNSRERMKRIEEGIKELGSQILKEHPVENTQL
QNEKLYLYYLQNGRDMYVDQELDINRLSDYDVDHI
VPQSFIKDDSIDNKVLTRSDKNRGKSDNVPSEEVV
KKMKNYWRQLLNAKLITQRKFDNLTKAERGGLSEL
DKAGFIKRQLVETRQITKHVAQILDSRMNTKYDEN
DKLIREVKVITLKSKLVSDFRKDFQFYKVREINNY
HHAHDAYLNAVVGTALIKKYPKLESEFVYGDYKVY
DVRKMIAKSEQEIGKATAKYFFYSNIMNFFKTEIT
LANGEIRKRPLIETNGETGEIVWDKGRDFATVRKV
LSMPQVNIVKKTEVQTGGFSKESILPKRNSDKLIA
RKKDWDPKKYGGFDSPTVAYSVLVVAKVEKGKSKK
LKSVKELLGITIMERSSFEKNPIDFLEAKGYKEVK
KDLIIKLPKYSLFELENGRKRMLASAGELQKGNEL
ALPSKYVNFLYLASHYEKLKGSPEDNEQKQLFVEQ
HKHYLDEIIEQISEFSKRVILADANLDKVLSAYNK
HRDKPIREQAENIIHLFTLTNLGAPAAFKYFDTTI
DRKRYTSTKEVLDATLIHQSITGLYETRIDLSQLG
GD
(single underline: HNH domain;
double underline:RuvC domain)

[0134] A nuclease-inactivated Cas9 protein may interchangeably be referred to as a “dCas9” protein (for nuclease-“dead” Cas9) or catalytically inactive Cas9. Methods for generating a Cas9 protein (or a fragment thereof) having an inactive DNA cleavage domain are known (See, e.g., Jinek et al., Science. 337:816-821(2012); Qi et al., “Repurposing CRISPR as an RNA-Guided Platform for Sequence-Specific Control of Gene Expression” (2013) Cell. 28; 152(5):1173-83, the entire contents of each of which are incorporated herein by reference). For example, the DNA cleavage domain of Cas9 is known to include two subdomains, the HNH nuclease subdomain and the RuvC1 subdomain. The HNH subdomain cleaves the strand complementary to the gRNA, whereas the RuvC1 subdomain cleaves the non-complementary strand. Mutations within these subdomains can silence the nuclease activity of Cas9. For example, the mutations D10A and H840A completely inactivate the nuclease activity of S. pyogenes Cas9 (Jinek et al., Science. 337:816-821(2012); Qi et al., Cell. 28; 152(5):1173-83 (2013)). In some embodiments, a Cas9 nuclease has an inactive (e.g., an inactivated) DNA cleavage domain, that is, the Cas9 is a nickase, referred to as an “nCas9” protein (for “nickase” Cas9). In some embodiments, proteins comprising fragments of Cas9 are provided. For example, in some embodiments, a protein comprises one of two Cas9 domains: (1) the gRNA binding domain of Cas9; or (2) the DNA cleavage domain of Cas9. In some embodiments, proteins comprising Cas9 or fragments thereof are referred to as “Cas9 variants.” A Cas9 variant shares homology to Cas9, or a fragment thereof. For example, a Cas9 variant is at least about 70% identical, at least about 80% identical, at least about 90% identical, at least about 95% identical, at least about 96% identical, at least about 97% identical, at least about 98% identical, at least about 99% identical, at least about 99.5% identical, or at least about 99.9% identical to wild-type Cas9. In some embodiments, the Cas9 variant may have 1, 2, 3, 4, 5, 6, 7, 8, 9, 10, 11, 12, 13, 14, 15, 16, 17, 18, 19, 20, 21, 22, 21, 24, 25, 26, 27, 28, 29, 30, 31, 32, 33, 34, 35, 36, 37, 38, 39, 40, 41, 42, 43, 44, 45, 46, 47, 48, 49, 50 or more amino acid changes compared to wild-type Cas9. In some embodiments, the Cas9 variant comprises a fragment of Cas9 (e.g., a gRNA binding domain or a DNA-cleavage domain), such that the fragment is at least about 70% identical, at least about 80% identical, at least about 90% identical, at least about 95% identical, at least about 96% identical, at least about 97% identical, at least about 98% identical, at least about 99% identical, at least about 99.5% identical, or at least about 99.9% identical to the corresponding fragment of wild-type Cas9. In some embodiments, the fragment is at least 30%, at least 35%, at least 40%, at least 45%, at least 50%, at least 55%, at least 60%, at least 65%, at least 70%, at least 75%, at least 80%, at least 85%, at least 90%, at least 95% identical, at least 96%, at least 97%, at least 98%, at least 99%, or at least 99.5% of the amino acid length of a corresponding wild-type Cas9.

[0135] In some embodiments, the fragment is at least 100 amino acids in length. In some embodiments, the fragment is at least 100, 150, 200, 250, 300, 350, 400, 450, 500, 550, 600, 650, 700, 750, 800, 850, 900, 950, 1000, 1050, 1100, 1150, 1200, 1250, or at least 1300 amino acids in length.

[0136] In some embodiments, wild-type Cas9 corresponds to Cas9 from Streptococcus pyogenes (NCBI Reference Sequence: NC 017053.1, nucleotide and amino acid sequences as follows).

(SEQ ID NO: 43)
ATGGATAAGAAATACTCAATAGGCTTAGATATCGG
CACAAATAGCGTCGGATGGGCGGTGATCACTGATG
ATTATAAGGTTCCGTCTAAAAAGTTCAAGGTTCTG
GGAAATACAGACCGCCACAGTATCAAAAAAAATCT
TATAGGGGCTCTTTTATTTGGCAGTGGAGAGACAG
CGGAAGCGACTCGTCTCAAACGGACAGCTCGTAGA
AGGTATACACGTCGGAAGAATCGTATTTGTTATCT
ACAGGAGATTTTTTCAAATGAGATGGCGAAAGTAG
ATGATAGTTTCTTTCATCGACTTGAAGAGTCTTTT
TTGGTGGAAGAAGACAAGAAGCATGAACGTCATCC
TATTTTTGGAAATATAGTAGATGAAGTTGCTTATC
ATGAGAAATATCCAACTATCTATCATCTGCGAAAA
AAATTGGCAGATTCTACTGATAAAGCGGATTTGCG
CTTAATCTATTTGGCCTTAGCGCATATGATTAAGT
TTCGTGGTCATTTTTTGATTGAGGGAGATTTAAAT
CCTGATAATAGTGATGTGGACAAACTATTTATCCA
GTTGGTACAAATCTACAATCAATTATTTGAAGAAA
ACCCTATTAACGCAAGTAGAGTAGATGCTAAAGCG
ATTCTTTCTGCACGATTGAGTAAATCAAGACGATT
AGAAAATCTCATTGCTCAGCTCCCCGGTGAGAAGA
GAAATGGCTTGTTTGGGAATCTCATTGCTTTGTCA
TTGGGATTGACCCCTAATTTTAAATCAAATTTTGA
TTTGGCAGAAGATGCTAAATTACAGCTTTCAAAAG
ATACTTACGATGATGATTTAGATAATTTATTGGCG
CAAATTGGAGATCAATATGCTGATTTGTTTTTGGC
AGCTAAGAATTTATCAGATGCTATTTTACTTTCAG
ATATCCTAAGAGTAAATAGTGAAATAACTAAGGCT
CCCCTATCAGCTTCAATGATTAAGCGCTACGATGA
ACATCATCAAGACTTGACTCTTTTAAAAGCTTTAG
TTCGACAACAACTTCCAGAAAAGTATAAAGAAATC
TTTTTTGATCAATCAAAAAACGGATATGCAGGTTA
TATTGATGGGGGAGCTAGCCAAGAAGAATTTTATA
AATTTATCAAACCAATTTTAGAAAAAATGGATGGT
ACTGAGGAATTATTGGTGAAACTAAATCGTGAAGA
TTTGCTGCGCAAGCAACGGACCTTTGACAACGGCT
CTATTCCCCATCAAATTCACTTGGGTGAGCTGCAT
GCTATTTTGAGAAGACAAGAAGACTTTTATCCATT
TTTAAAAGACAATCGTGAGAAGATTGAAAAAATCT
TGACTTTTCGAATTCCTTATTATGTTGGTCCATTG
GCGCGTGGCAATAGTCGTTTTGCATGGATGACTCG
GAAGTCTGAAGAAACAATTACCCCATGGAATTTTG
AAGAAGTTGTCGATAAAGGTGCTTCAGCTCAATCA
TTTATTGAACGCATGACAAACTTTGATAAAAATCT
TCCAAATGAAAAAGTACTACCAAAACATAGTTTGC
TTTATGAGTATTTTACGGTTTATAACGAATTGACA
AAGGTCAAATATGTTACTGAGGGAATGCGAAAACC
AGCATTTCTTTCAGGTGAACAGAAGAAAGCCATTG
TTGATTTACTCTTCAAAACAAATCGAAAAGTAACC
GTTAAGCAATTAAAAGAAGATTATTTCAAAAAAAT
AGAATGTTTTGATAGTGTTGAAATTTCAGGAGTTG
AAGATAGATTTAATGCTTCATTAGGCGCCTACCAT
GATTTGCTAAAAATTATTAAAGATAAAGATTTTTT
GGATAATGAAGAAAATGAAGATATCTTAGAGGATA
TTGTTTTAACATTGACCTTATTTGAAGATAGGGGG
ATGATTGAGGAAAGACTTAAAACATATGCTCACCT
CTTTGATGATAAGGTGATGAAACAGCTTAAACGTC
GCCGTTATACTGGTTGGGGACGTTTGTCTCGAAAA
TTGATTAATGGTATTAGGGATAAGCAATCTGGCAA
AACAATATTAGATTTTTTGAAATCAGATGGTTTTG
CCAATCGCAATTTTATGCAGCTGATCCATGATGAT
AGTTTGACATTTAAAGAAGATATTCAAAAAGCACA
GGTGTCTGGACAAGGCCATAGTTTACATGAACAGA
TTGCTAACTTAGCTGGCAGTCCTGCTATTAAAAAA
GGTATTTTACAGACTGTAAAAATTGTTGATGAACT
GGTCAAAGTAATGGGGCATAAGCCAGAAAATATCG
TTATTGAAATGGCACGTGAAAATCAGACAACTCAA
AAGGGCCAGAAAAATTCGCGAGAGCGTATGAAACG
AATCGAAGAAGGTATCAAAGAATTAGGAAGTCAGA
TTCTTAAAGAGCATCCTGTTGAAAATACTCAATTG
CAAAATGAAAAGCTCTATCTCTATTATCTACAAAA
TGGAAGAGACATGTATGTGGACCAAGAATTAGATA
TTAATCGTTTAAGTGATTATGATGTCGATCACATT
GTTCCACAAAGTTTCATTAAAGACGATTCAATAGA
CAATAAGGTACTAACGCGTTCTGATAAAAATCGTG
GTAAATCGGATAACGTTCCAAGTGAAGAAGTAGTC
AAAAAGATGAAAAACTATTGGAGACAACTTCTAAA
CGCCAAGTTAATCACTCAACGTAAGTTTGATAATT
TAACGAAAGCTGAACGTGGAGGTTTGAGTGAACTT
GATAAAGCTGGTTTTATCAAACGCCAATTGGTTGA
AACTCGCCAAATCACTAAGCATGTGGCACAAATTT
TGGATAGTCGCATGAATACTAAATACGATGAAAAT
GATAAACTTATTCGAGAGGTTAAAGTGATTACCTT
AAAATCTAAATTAGTTTCTGACTTCCGAAAAGATT
TCCAATTCTATAAAGTACGTGAGATTAACAATTAC
CATCATGCCCATGATGCGTATCTAAATGCCGTCGT
TGGAACTGCTTTGATTAAGAAATATCCAAAACTTG
AATCGGAGTTTGTCTATGGTGATTATAAAGTTTAT
GATGTTCGTAAAATGATTGCTAAGTCTGAGCAAGA
AATAGGCAAAGCAACCGCAAAATATTTCTTTTACT
CTAATATCATGAACTTCTTCAAAACAGAAATTACA
CTTGCAAATGGAGAGATTCGCAAACGCCCTCTAAT
CGAAACTAATGGGGAAACTGGAGAAATTGTCTGGG
ATAAAGGGCGAGATTTTGCCACAGTGCGCAAAGTA
TTGTCCATGCCCCAAGTCAATATTGTCAAGAAAAC
AGAAGTACAGACAGGCGGATTCTCCAAGGAGTCAA
TTTTACCAAAAAGAAATTCGGACAAGCTTATTGCT
CGTAAAAAAGACTGGGATCCAAAAAAATATGGTGG
TTTTGATAGTCCAACGGTAGCTTATTCAGTCCTAG
TGGTTGCTAAGGTGGAAAAAGGGAAATCGAAGAAG
TTAAAATCCGTTAAAGAGTTACTAGGGATCACAAT
TATGGAAAGAAGTTCCTTTGAAAAAAATCCGATTG
ACTTTTTAGAAGCTAAAGGATATAAGGAAGTTAAA
AAAGACTTAATCATTAAACTACCTAAATATAGTCT
TTTTGAGTTAGAAAACGGTCGTAAACGGATGCTGG
CTAGTGCCGGAGAATTACAAAAAGGAAATGAGCTG
GCTCTGCCAAGCAAATATGTGAATTTTTTATATTT
AGCTAGTCATTATGAAAAGTTGAAGGGTAGTCCAG
AAGATAACGAACAAAAACAATTGTTTGTGGAGCAG
CATAAGCATTATTTAGATGAGATTATTGAGCAAAT
CAGTGAATTTTCTAAGCGTGTTATTTTAGCAGATG
CCAATTTAGATAAAGTTCTTAGTGCATATAACAAA
CATAGAGACAAACCAATACGTGAACAAGCAGAAAA
TATTATTCATTTATTTACGTTGACGAATCTTGGAG
CTCCCGCTGCTTTTAAATATTTTGATACAACAATT
GATCGTAAACGATATACGTCTACAAAAGAAGTTTT
AGATGCCACTCTTATCCATCAATCCATCACTGGTC
TTTATGAAACACGCATTGATTTGAGTCAGCTAGGA
GGTGACTGA
(SEQ ID NO: 42)
MDKKYSIGLDIGTNSVGWAVITDDYKVPSKKFKVL
GNTDRHSIKKNLIGALLFGSGETAEATRLKRTARR
RYTRRKNRICYLQEIFSNEMAKVDDSFFHRLEESF
LVEEDKKHERHPIFGNIVDEVAYHEKYPTIYHLRK
KLADSTDKADLRLIYLALAHMIKFRGHFLIEGDLN
PDNSDVDKLFIQLVQIYNQLFEENPINASRVDAKA
ILSARLSKSRRLENLIAQLPGEKRNGLFGNLIALS
LGLTPNFKSNFDLAEDAKLQLSKDTYDDDLDNLLA
QIGDQYADLFLAAKNLSDAILLSDILRVNSEITKA
PLSASMIKRYDEHHQDLTLLKALVRQQLPEKYKEI
FFDQSKNGYAGYIDGGASQEEFYKFIKPILEKMDG
TEELLVKLNREDLLRKQRTFDNGSIPHQIHLGELH
AILRRQEDFYPFLKDNREKIEKILTFRIPYYVGPL
ARGNSRFAWMTRKSEETITPWNFEEVVDKGASAQS
FIERMTNFDKNLPNEKVLPKHSLLYEYFTVYNELT
KVKYVTEGMRKPAFLSGEQKKAIVDLLFKTNRKVT
VKQLKEDYFKKIECFDSVEISGVEDRFNASLGAYH
DLLKIIKDKDFLDNEENEDILEDIVLTLTLFEDRG
MIEERLKTYAHLFDDKVMKQLKRRRYTGWGRLSRK
LINGIRDKQSGKTILDFLKSDGFANRNFMQLIHDD
SLTFKEDIQKAQVSGQGHSLHEQIANLAGSPAIKK
GILQTVKIVDELVKVMGHKPENIVIEMARENQTTQ
KGQKNSRERMKRIEEGIKELGSQILKEHPVENTQL
QNEKLYLYYLQNGRDMYVDQELDINRLSDYDVDHI
VPQSFIKDDSIDNKVLTRSDKNRGKSDNVPSEEVV
KKMKNYWRQLLNAKLITQRKFDNLTKAERGGLSEL
DKAGFIKRQLVETRQITKHVAQILDSRMNTKYDEN
DKLIREVKVITLKSKLVSDFRKDFQFYKVREINNY
HHAHDAYLNAVVGTALIKKYPKLESEFVYGDYKVY
DVRKMIAKSEQEIGKATAKYFFYSNIMNFFKTEIT
LANGEIRKRPLIETNGETGEIVWDKGRDFATVRKV
LSMPQVNIVKKTEVQTGGFSKESILPKRNSDKLIA
RKKDWDPKKYGGFDSPTVAYSVLVVAKVEKGKSKK
LKSVKELLGITIMERSSFEKNPIDFLEAKGYKEVK
KDLIIKLPKYSLFELENGRKRMLASAGELQKGNEL
ALPSKYVNFLYLASHYEKLKGSPEDNEQKQLFVEQ
HKHYLDEIIEQISEFSKRVILADANLDKVLSAYNK
HRDKPIREQAENIIHLFTLTNLGAPAAFKYFDTTI
DRKRYTSTKEVLDATLIHQSITGLYETRIDLSQLG
GD
(single underline: HNH domain;
double underline: RuvC domain)

[0137] In some embodiments, wild-type Cas9 corresponds to, or comprises the following nucleotide and/or amino acid sequences:

(SEQ ID NO: 44)
ATGGATAAAAAGTATTCTATTGGTTTAGACATCGGCACTAATTCCGTTGGATGGGCTGTCAT
AACCGATGAATACAAAGTACCTTCAAAGAAATTTAAGGTGTTGGGGAACACAGACCGTCATT
CGATTAAAAAGAATCTTATCGGTGCCCTCCTATTCGATAGTGGCGAAACGGCAGAGGCGACT
CGCCTGAAACGAACCGCTCGGAGAAGGTATACACGTCGCAAGAACCGAATATGTTACTTACA
AGAAATTTTTAGCAATGAGATGGCCAAAGTTGACGATTCTTTCTTTCACCGTTTGGAAGAGT
CCTTCCTTGTCGAAGAGGACAAGAAACATGAACGGCACCCCATCTTTGGAAACATAGTAGAT
GAGGTGGCATATCATGAAAAGTACCCAACGATTTATCACCTCAGAAAAAAGCTAGTTGACTC
AACTGATAAAGCGGACCTGAGGTTAATCTACTTGGCTCTTGCCCATATGATAAAGTTCCGTG
GGCACTTTCTCATTGAGGGTGATCTAAATCCGGACAACTCGGATGTCGACAAACTGTTCATC
CAGTTAGTACAAACCTATAATCAGTTGTTTGAAGAGAACCCTATAAATGCAAGTGGCGTGGA
TGCGAAGGCTATTCTTAGCGCCCGCCTCTCTAAATCCCGACGGCTAGAAAACCTGATCGCAC
AATTACCCGGAGAGAAGAAAAATGGGTTGTTCGGTAACCTTATAGCGCTCTCACTAGGCCTG
ACACCAAATTTTAAGTCGAACTTCGACTTAGCTGAAGATGCCAAATTGCAGCTTAGTAAGGA
CACGTACGATGACGATCTCGACAATCTACTGGCACAAATTGGAGATCAGTATGCGGACTTAT
TTTTGGCTGCCAAAAACCTTAGCGATGCAATCCTCCTATCTGACATACTGAGAGTTAATACT
GAGATTACCAAGGCGCCGTTATCCGCTTCAATGATCAAAAGGTACGATGAACATCACCAAGA
CTTGACACTTCTCAAGGCCCTAGTCCGTCAGCAACTGCCTGAGAAATATAAGGAAATATTCT
TTGATCAGTCGAAAAACGGGTACGCAGGTTATATTGACGGCGGAGCGAGTCAAGAGGAATTC
TACAAGTTTATCAAACCCATATTAGAGAAGATGGATGGGACGGAAGAGTTGCTTGTAAAACT
CAATCGCGAAGATCTACTGCGAAAGCAGCGGACTTTCGACAACGGTAGCATTCCACATCAAA
TCCACTTAGGCGAATTGCATGCTATACTTAGAAGGCAGGAGGATTTTTATCCGTTCCTCAAA
GACAATCGTGAAAAGATTGAGAAAATCCTAACCTTTCGCATACCTTACTATGTGGGACCCCT
GGCCCGAGGGAACTCTCGGTTCGCATGGATGACAAGAAAGTCCGAAGAAACGATTACTCCAT
GGAATTTTGAGGAAGTTGTCGATAAAGGTGCGTCAGCTCAATCGTTCATCGAGAGGATGACC
AACTTTGACAAGAATTTACCGAACGAAAAAGTATTGCCTAAGCACAGTTTACTTTACGAGTA
TTTCACAGTGTACAATGAACTCACGAAAGTTAAGTATGTCACTGAGGGCATGCGTAAACCCG
CCTTTCTAAGCGGAGAACAGAAGAAAGCAATAGTAGATCTGTTATTCAAGACCAACCGCAAA
GTGACAGTTAAGCAATTGAAAGAGGACTACTTTAAGAAAATTGAATGCTTCGATTCTGTCGA
GATCTCCGGGGTAGAAGATCGATTTAATGCGTCACTTGGTACGTATCATGACCTCCTAAAGA
TAATTAAAGATAAGGACTTCCTGGATAACGAAGAGAATGAAGATATCTTAGAAGATATAGTG
TTGACTCTTACCCTCTTTGAAGATCGGGAAATGATTGAGGAAAGACTAAAAACATACGCTCA
CCTGTTCGACGATAAGGTTATGAAACAGTTAAAGAGGCGTCGCTATACGGGCTGGGGACGAT
TGTCGCGGAAACTTATCAACGGGATAAGAGACAAGCAAAGTGGTAAAACTATTCTCGATTTT
CTAAAGAGCGACGGCTTCGCCAATAGGAACTTTATGCAGCTGATCCATGATGACTCTTTAAC
CTTCAAAGAGGATATACAAAAGGCACAGGTTTCCGGACAAGGGGACTCATTGCACGAACATA
TTGCGAATCTTGCTGGTTCGCCAGCCATCAAAAAGGGCATACTCCAGACAGTCAAAGTAGTG
GATGAGCTAGTTAAGGTCATGGGACGTCACAAACCGGAAAACATTGTAATCGAGATGGCACG
CGAAAATCAAACGACTCAGAAGGGGCAAAAAAACAGTCGAGAGCGGATGAAGAGAATAGAAG
AGGGTATTAAAGAACTGGGCAGCCAGATCTTAAAGGAGCATCCTGTGGAAAATACCCAATTG
CAGAACGAGAAACTTTACCTCTATTACCTACAAAATGGAAGGGACATGTATGTTGATCAGGA
ACTGGACATAAACCGTTTATCTGATTACGACGTCGATCACATTGTACCCCAATCCTTTTTGA
AGGACGATTCAATCGACAATAAAGTGCTTACACGCTCGGATAAGAACCGAGGGAAAAGTGAC
AATGTTCCAAGCGAGGAAGTCGTAAAGAAAATGAAGAACTATTGGCGGCAGCTCCTAAATGC
GAAACTGATAACGCAAAGAAAGTTCGATAACTTAACTAAAGCTGAGAGGGGTGGCTTGTCTG
AACTTGACAAGGCCGGATTTATTAAACGTCAGCTCGTGGAAACCCGCCAAATCACAAAGCAT
GTTGCACAGATACTAGATTCCCGAATGAATACGAAATACGACGAGAACGATAAGCTGATTCG
GGAAGTCAAAGTAATCACTTTAAAGTCAAAATTGGTGTCGGACTTCAGAAAGGATTTTCAAT
TCTATAAAGTTAGGGAGATAAATAACTACCACCATGCGCACGACGCTTATCTTAATGCCGTC
GTAGGGACCGCACTCATTAAGAAATACCCGAAGCTAGAAAGTGAGTTTGTGTATGGTGATTA
CAAAGTTTATGACGTCCGTAAGATGATCGCGAAAAGCGAACAGGAGATAGGCAAGGCTACAG
CCAAATACTTCTTTTATTCTAACATTATGAATTTCTTTAAGACGGAAATCACTCTGGCAAAC
GGAGAGATACGCAAACGACCTTTAATTGAAACCAATGGGGAGACAGGTGAAATCGTATGGGA
TAAGGGCCGGGACTTCGCGACGGTGAGAAAAGTTTTGTCCATGCCCCAAGTCAACATAGTAA
AGAAAACTGAGGTGCAGACCGGAGGGTTTTCAAAGGAATCGATTCTTCCAAAAAGGAATAGT
GATAAGCTCATCGCTCGTAAAAAGGACTGGGACCCGAAAAAGTACGGTGGCTTCGATAGCCC
TACAGTTGCCTATTCTGTCCTAGTAGTGGCAAAAGTTGAGAAGGGAAAATCCAAGAAACTGA
AGTCAGTCAAAGAATTATTGGGGATAACGATTATGGAGCGCTCGTCTTTTGAAAAGAACCCC
ATCGACTTCCTTGAGGCGAAAGGTTACAAGGAAGTAAAAAAGGATCTCATAATTAAACTACC
AAAGTATAGTCTGTTTGAGTTAGAAAATGGCCGAAAACGGATGTTGGCTAGCGCCGGAGAGC
TTCAAAAGGGGAACGAACTCGCACTACCGTCTAAATACGTGAATTTCCTGTATTTAGCGTCC
CATTACGAGAAGTTGAAAGGTTCACCTGAAGATAACGAACAGAAGCAACTTTTTGTTGAGCA
GCACAAACATTATCTCGACGAAATCATAGAGCAAATTTCGGAATTCAGTAAGAGAGTCATCC
TAGCTGATGCCAATCTGGACAAAGTATTAAGCGCATACAACAAGCACAGGGATAAACCCATA
CGTGAGCAGGCGGAAAATATTATCCATTTGTTTACTCTTACCAACCTCGGCGCTCCAGCCGC
ATTCAAGTATTTTGACACAACGATAGATCGCAAACGATACACTTCTACCAAGGAGGTGCTAG
ACGCGACACTGATTCACCAATCCATCACGGGATTATATGAAACTCGGATAGATTTGTCACAG
CTTGGGGGTGACGGATCCCCCAAGAAGAAGAGGAAAGTCTCGAGCGACTACAAAGACCATGA
CGGTGATTATAAAGATCATGACATCGATTACAAGGATGACGATGACAAGGCTGCAGGA
(SEQ ID NO: 1)
MDKKYSIGLDIGTNSVGWAVITDEYKVPSKKFKVLGNTDRHSIKKNLIGALLFDSGETAEAT
RLKRTARRRYTRRKNRICYLQEIFSNEMAKVDDSFFHRLEESFLVEEDKKHERHPIFGNIVD
EVAYHEKYPTIYHLRKKLVDSTDKADLRLIYLALAHMIKFRGHFLIEGDLNPDNSDVDKLFI
QLVQTYNQLFEENPINASGVDAKAILSARLSKSRRLENLIAQLPGEKKNGLFGNLIALSLGL
TPNFKSNFDLAEDAKLQLSKDTYDDDLDNLLAQIGDQYADLFLAAKNLSDAILLSDILRVNT
EITKAPLSASMIKRYDEHHQDLTLLKALVRQQLPEKYKEIFFDQSKNGYAGYIDGGASQEEF
YKFIKPILEKMDGTEELLVKLNREDLLRKQRTFDNGSIPHQIHLGELHAILRRQEDFYPFLK
DNREKIEKILTFRIPYYVGPLARGNSRFAWMTRKSEETITPWNFEEVVDKGASAQSFIERMT
NFDKNLPNEKVLPKHSLLYEYFTVYNELTKVKYVTEGMRKPAFLSGEQKKAIVDLLFKTNRK
VTVKQLKEDYFKKIECFDSVEISGVEDRFNASLGTYHDLLKIIKDKDFLDNEENEDILEDIV
LTLTLFEDREMIEERLKTYAHLFDDKVMKQLKRRRYTGWGRLSRKLINGIRDKQSGKTILDF
LKSDGFANRNFMQLIHDDSLTFKEDIQKAQVSGQGDSLHEHIANLAGSPAIKKGILQTVKVV
DELVKVMGRHKPENIVIEMARENQTTQKGQKNSRERMKRIEEGIKELGSQILKEHPVENTQL
QNEKLYLYYLQNGRDMYVDQELDINRLSDYDVDHIVPQSFLKDDSIDNKVLTRSDKNRGKSD
NVPSEEVVKKMKNYWRQLLNAKLITQRKFDNLTKAERGGLSELDKAGFIKRQLVETRQITKH
VAQILDSRMNTKYDENDKLIREVKVITLKSKLVSDFRKDFQFYKVREINNYHHAHDAYLNAV
VGTALIKKYPKLESEFVYGDYKVYDVRKMIAKSEQEIGKATAKYFFYSNIMNFFKTEITLAN
GEIRKRPLIETNGETGEIVWDKGRDFATVRKVLSMPQVNIVKKTEVQTGGFSKESILPKRNS
DKLIARKKDWDPKKYGGFDSPTVAYSVLVVAKVEKGKSKKLKSVKELLGITIMERSSFEKNP
IDFLEAKGYKEVKKDLIIKLPKYSLFELENGRKRMLASAGELQKGNELALPSKYVNFLYLAS
HYEKLKGSPEDNEQKQLFVEQHKHYLDEIIEQISEFSKRVILADANLDKVLSAYNKHRDKPI
REQAENIIHLFTLTNLGAPAAFKYFDTTIDRKRYTSTKEVLDATLIHQSITGLYETRIDLSQ
LGGD
(single underline: HNH domain; double underline: RuvC domain)

[0138] In some embodiments, wild-type Cas9 corresponds to Cas9 from Streptococcus pyogenes (NCBI Reference Sequence: NC_002737.2 (nucleotide sequence as follows); and Uniprot Reference Sequence: Q99ZW2 (amino acid sequence as follows).

(SEQ ID NO: 45)
ATGGATAAGAAATACTCAATAGGCTTAGATATCGGCACAAATAGCGTCGGATGGGCGGTGAT
CACTGATGAATATAAGGTTCCGTCTAAAAAGTTCAAGGTTCTGGGAAATACAGACCGCCACA
GTATCAAAAAAAATCTTATAGGGGCTCTTTTATTTGACAGTGGAGAGACAGCGGAAGCGACT
CGTCTCAAACGGACAGCTCGTAGAAGGTATACACGTCGGAAGAATCGTATTTGTTATCTACA
GGAGATTTTTTCAAATGAGATGGCGAAAGTAGATGATAGTTTCTTTCATCGACTTGAAGAGT
CTTTTTTGGTGGAAGAAGACAAGAAGCATGAACGTCATCCTATTTTTGGAAATATAGTAGAT
GAAGTTGCTTATCATGAGAAATATCCAACTATCTATCATCTGCGAAAAAAATTGGTAGATTC
TACTGATAAAGCGGATTTGCGCTTAATCTATTTGGCCTTAGCGCATATGATTAAGTTTCGTG
GTCATTTTTTGATTGAGGGAGATTTAAATCCTGATAATAGTGATGTGGACAAACTATTTATC
CAGTTGGTACAAACCTACAATCAATTATTTGAAGAAAACCCTATTAACGCAAGTGGAGTAGA
TGCTAAAGCGATTCTTTCTGCACGATTGAGTAAATCAAGACGATTAGAAAATCTCATTGCTC
AGCTCCCCGGTGAGAAGAAAAATGGCTTATTTGGGAATCTCATTGCTTTGTCATTGGGTTTG
ACCCCTAATTTTAAATCAAATTTTGATTTGGCAGAAGATGCTAAATTACAGCTTTCAAAAGA
TACTTACGATGATGATTTAGATAATTTATTGGCGCAAATTGGAGATCAATATGCTGATTTGT
TTTTGGCAGCTAAGAATTTATCAGATGCTATTTTACTTTCAGATATCCTAAGAGTAAATACT
GAAATAACTAAGGCTCCCCTATCAGCTTCAATGATTAAACGCTACGATGAACATCATCAAGA
CTTGACTCTTTTAAAAGCTTTAGTTCGACAACAACTTCCAGAAAAGTATAAAGAAATCTTTT
TTGATCAATCAAAAAACGGATATGCAGGTTATATTGATGGGGGAGCTAGCCAAGAAGAATTT
TATAAATTTATCAAACCAATTTTAGAAAAAATGGATGGTACTGAGGAATTATTGGTGAAACT
AAATCGTGAAGATTTGCTGCGCAAGCAACGGACCTTTGACAACGGCTCTATTCCCCATCAAA
TTCACTTGGGTGAGCTGCATGCTATTTTGAGAAGACAAGAAGACTTTTATCCATTTTTAAAA
GACAATCGTGAGAAGATTGAAAAAATCTTGACTTTTCGAATTCCTTATTATGTTGGTCCATT
GGCGCGTGGCAATAGTCGTTTTGCATGGATGACTCGGAAGTCTGAAGAAACAATTACCCCAT
GGAATTTTGAAGAAGTTGTCGATAAAGGTGCTTCAGCTCAATCATTTATTGAACGCATGACA
AACTTTGATAAAAATCTTCCAAATGAAAAAGTACTACCAAAACATAGTTTGCTTTATGAGTA
TTTTACGGTTTATAACGAATTGACAAAGGTCAAATATGTTACTGAAGGAATGCGAAAACCAG
CATTTCTTTCAGGTGAACAGAAGAAAGCCATTGTTGATTTACTCTTCAAAACAAATCGAAAA
GTAACCGTTAAGCAATTAAAAGAAGATTATTTCAAAAAAATAGAATGTTTTGATAGTGTTGA
AATTTCAGGAGTTGAAGATAGATTTAATGCTTCATTAGGTACCTACCATGATTTGCTAAAAA
TTATTAAAGATAAAGATTTTTTGGATAATGAAGAAAATGAAGATATCTTAGAGGATATTGTT
TTAACATTGACCTTATTTGAAGATAGGGAGATGATTGAGGAAAGACTTAAAACATATGCTCA
CCTCTTTGATGATAAGGTGATGAAACAGCTTAAACGTCGCCGTTATACTGGTTGGGGACGTT
TGTCTCGAAAATTGATTAATGGTATTAGGGATAAGCAATCTGGCAAAACAATATTAGATTTT
TTGAAATCAGATGGTTTTGCCAATCGCAATTTTATGCAGCTGATCCATGATGATAGTTTGAC
ATTTAAAGAAGACATTCAAAAAGCACAAGTGTCTGGACAAGGCGATAGTTTACATGAACATA
TTGCAAATTTAGCTGGTAGCCCTGCTATTAAAAAAGGTATTTTACAGACTGTAAAAGTTGTT
GATGAATTGGTCAAAGTAATGGGGCGGCATAAGCCAGAAAATATCGTTATTGAAATGGCACG
TGAAAATCAGACAACTCAAAAGGGCCAGAAAAATTCGCGAGAGCGTATGAAACGAATCGAAG
AAGGTATCAAAGAATTAGGAAGTCAGATTCTTAAAGAGCATCCTGTTGAAAATACTCAATTG
CAAAATGAAAAGCTCTATCTCTATTATCTCCAAAATGGAAGAGACATGTATGTGGACCAAGA
ATTAGATATTAATCGTTTAAGTGATTATGATGTCGATCACATTGTTCCACAAAGTTTCCTTA
AAGACGATTCAATAGACAATAAGGTCTTAACGCGTTCTGATAAAAATCGTGGTAAATCGGAT
AACGTTCCAAGTGAAGAAGTAGTCAAAAAGATGAAAAACTATTGGAGACAACTTCTAAACGC
CAAGTTAATCACTCAACGTAAGTTTGATAATTTAACGAAAGCTGAACGTGGAGGTTTGAGTG
AACTTGATAAAGCTGGTTTTATCAAACGCCAATTGGTTGAAACTCGCCAAATCACTAAGCAT
GTGGCACAAATTTTGGATAGTCGCATGAATACTAAATACGATGAAAATGATAAACTTATTCG
AGAGGTTAAAGTGATTACCTTAAAATCTAAATTAGTTTCTGACTTCCGAAAAGATTTCCAAT
TCTATAAAGTACGTGAGATTAACAATTACCATCATGCCCATGATGCGTATCTAAATGCCGTC
GTTGGAACTGCTTTGATTAAGAAATATCCAAAACTTGAATCGGAGTTTGTCTATGGTGATTA
TAAAGTTTATGATGTTCGTAAAATGATTGCTAAGTCTGAGCAAGAAATAGGCAAAGCAACCG
CAAAATATTTCTTTTACTCTAATATCATGAACTTCTTCAAAACAGAAATTACACTTGCAAAT
GGAGAGATTCGCAAACGCCCTCTAATCGAAACTAATGGGGAAACTGGAGAAATTGTCTGGGA
TAAAGGGCGAGATTTTGCCACAGTGCGCAAAGTATTGTCCATGCCCCAAGTCAATATTGTCA
AGAAAACAGAAGTACAGACAGGCGGATTCTCCAAGGAGTCAATTTTACCAAAAAGAAATTCG
GACAAGCTTATTGCTCGTAAAAAAGACTGGGATCCAAAAAAATATGGTGGTTTTGATAGTCC
AACGGTAGCTTATTCAGTCCTAGTGGTTGCTAAGGTGGAAAAAGGGAAATCGAAGAAGTTAA
AATCCGTTAAAGAGTTACTAGGGATCACAATTATGGAAAGAAGTTCCTTTGAAAAAAATCCG
ATTGACTTTTTAGAAGCTAAAGGATATAAGGAAGTTAAAAAAGACTTAATCATTAAACTACC
TAAATATAGTCTTTTTGAGTTAGAAAACGGTCGTAAACGGATGCTGGCTAGTGCCGGAGAAT
TACAAAAAGGAAATGAGCTGGCTCTGCCAAGCAAATATGTGAATTTTTTATATTTAGCTAGT
CATTATGAAAAGTTGAAGGGTAGTCCAGAAGATAACGAACAAAAACAATTGTTTGTGGAGCA
GCATAAGCATTATTTAGATGAGATTATTGAGCAAATCAGTGAATTTTCTAAGCGTGTTATTT
TAGCAGATGCCAATTTAGATAAAGTTCTTAGTGCATATAACAAACATAGAGACAAACCAATA
CGTGAACAAGCAGAAAATATTATTCATTTATTTACGTTGACGAATCTTGGAGCTCCCGCTGC
TTTTAAATATTTTGATACAACAATTGATCGTAAACGATATACGTCTACAAAAGAAGTTTTAG
ATGCCACTCTTATCCATCAATCCATCACTGGTCTTTATGAAACACGCATTGATTTGAGTCAG
CTAGGAGGTGACTGA
(SEQ ID NO: 1)
MDKKYSIGLDIGTNSVGWAVITDEYKVPSKKFKVLGNTDRHSIKKNLIGALLFDSGETAEAT
RLKRTARRRYTRRKNRICYLQEIFSNEMAKVDDSFFHRLEESFLVEEDKKHERHPIFGNIVD
EVAYHEKYPTIYHLRKKLVDSTDKADLRLIYLALAHMIKFRGHFLIEGDLNPDNSDVDKLFI
QLVQTYNQLFEENPINASGVDAKAILSARLSKSRRLENLIAQLPGEKKNGLFGNLIALSLGL
TPNFKSNFDLAEDAKLQLSKDTYDDDLDNLLAQIGDQYADLFLAAKNLSDAILLSDILRVNT
EITKAPLSASMIKRYDEHHQDLTLLKALVRQQLPEKYKEIFFDQSKNGYAGYIDGGASQEEF
YKFIKPILEKMDGTEELLVKLNREDLLRKQRTFDNGSIPHQIHLGELHAILRRQEDFYPFLK
DNREKIEKILTFRIPYYVGPLARGNSRFAWMTRKSEETITPWNFEEVVDKGASAQSFIERMT
NFDKNLPNEKVLPKHSLLYEYFTVYNELTKVKYVTEGMRKPAFLSGEQKKAIVDLLFKTNRK
VTVKQLKEDYFKKIECFDSVEISGVEDRFNASLGTYHDLLKIIKDKDFLDNEENEDILEDIV
LTLTLFEDREMIEERLKTYAHLFDDKVMKQLKRRRYTGWGRLSRKLINGIRDKQSGKTILDF
LKSDGFANRNFMQLIHDDSLTFKEDIQKAQVSGQGDSLHEHIANLAGSPAIKKGILQTVKVV
DELVKVMGRHKPENIVIEMARENQTTQKGQKNSRERMKRIEEGIKELGSQILKEHPVENTQL
QNEKLYLYYLQNGRDMYVDQELDINRLSDYDVDHIVPQSFLKDDSIDNKVLTRSDKNRGKSD
NVPSEEVVKKMKNYWRQLLNAKLITQRKFDNLTKAERGGLSELDKAGFIKRQLVETRQITKH
VAQILDSRMNTKYDENDKLIREVKVITLKSKLVSDFRKDFQFYKVREINNYHHAHDAYLNAV
VGTALIKKYPKLESEFVYGDYKVYDVRKMIAKSEOEIGKATAKYFFYSNIMNFFKTEITLAN
GEIRKRPLIETNGETGEIVWDKGRDFATVRKVLSMPQVNIVKKTEVQTGGFSKESILPKRNS
DKLIARKKDWDPKKYGGFDSPTVAYSVLVVAKVEKGKSKKLKSVKELLGITIMERSSFEKNP
IDFLEAKGYKEVKKDLIIKLPKYSLFELENGRKRMLASAGELQKGNELALPSKYVNFLYLAS
HYEKLKGSPEDNEQKQLFVEQHKHYLDEIIEQISEFSKRVILADANLDKVLSAYNKHRDKPI
REQAENIIHLFTLTNLGAPAAFKYFDTTIDRKRYTSTKEVLDATLIHQSITGLYETRIDLSQ
LGGD
(single underline: HNH domain; double underline: RuvC domain)

[0139] In some embodiments, Cas9 refers to Cas9 from: Corynebacterium ulcerans (NCBI Refs: NC_015683.1, NC_017317.1); Corynebacterium diphtheria (NCBI Refs: NC_016782.1, NC_016786.1); Spiroplasma syrphidicola (NCBI Ref: NC_021284.1); Prevotella intermedia (NCBI Ref: NC_017861.1); Spiroplasma taiwanense (NCBI Ref: NC_021846.1); Streptococcus iniae (NCBI Ref: NC_021314.1); Belliella baltica (NCBI Ref: NC_018010.1); Psychroflexus torquis I (NCBI Ref: NC_018721.1); Streptococcus thermophilus (NCBI Ref: YP_820832.1), Listeria innocua (NCBI Ref: NP_472073.1), Campylobacter jejuni (NCBI Ref: YP_002344900.1) or Neisseria meningitidis (NCBI Ref: YP_002342100.1) or to a Cas9 from any other organism.

[0140] In some embodiments, dCas9 corresponds to, or comprises in part or in whole, a Cas9 amino acid sequence having one or more mutations that inactivate the Cas9 nuclease activity. For example, in some embodiments, a dCas9 domain comprises D10A and an H840A mutation as numbered in SEQ ID NO: 1 or corresponding mutations in another Cas9. In some embodiments, the dCas9 comprises the amino acid sequence of dCas9 (D10A and H840A):

(SEQ ID NO: 46)
MDKKYSIGLAIGTNSVGWAVITDEYKVPSKKFKVLGNTDRHSIKKNLIGA
LLFDSGETAEATRLKRTARRRYTRRKNRICYLQEIFSNEMAKVDDSFFHR
LEESFLVEEDKKHERHPIFGNIVDEVAYHEKYPTIYHLRKKLVDSTDKAD
LRLIYLALAHMIKFRGHFLIEGDLNPDNSDVDKLFIQLVQTYNQLFEENP
INASGVDAKAILSARLSKSRRLENLIAQLPGEKKNGLFGNLIALSLGLTP
NFKSNFDLAEDAKLQLSKDTYDDDLDNLLAQIGDQYADLFLAAKNLSDAI
LLSDILRVNTEITKAPLSASMIKRYDEHHQDLTLLKALVRQQLPEKYKEI
FFDQSKNGYAGYIDGGASQEEFYKFIKPILEKMDGTEELLVKLNREDLLR
KQRTFDNGSIPHQIHLGELHAILRRQEDFYPFLKDNREKIEKILTFRIPY
YVGPLARGNSRFAWMTRKSEETITPWNFEEVVDKGASAQSFIERMTNFDK
NLPNEKVLPKHSLLYEYFTVYNELTKVKYVTEGMRKPAFLSGEQKKAIVD
LLFKTNRKVTVKQLKEDYFKKIECFDSVEISGVEDRFNASLGTYHDLLKI
IKDKDFLDNEENEDILEDIVLTLTLFEDREMIEERLKTYAHLFDDKVMKQ
LKRRRYTGWGRLSRKLINGIRDKQSGKTILDFLKSDGFANRNFMQLIHDD
SLTFKEDIQKAQVSGQGDSLHEHIANLAGSPAIKKGILQTVKVVDELVKV
MGRHKPENIVIEMARENQTTQKGQKNSRERMKRIEEGIKELGSQILKEHP
VENTQLQNEKLYLYYLQNGRDMYVDQELDINRLSDYDVDAIVPQSFLKDD
SIDNKVLTRSDKNRGKSDNVPSEEVVKKMKNYWRQLLNAKLITQRKFDNL
TKAERGGLSELDKAGFIKRQLVETRQITKHVAQILDSRMNTKYDENDKLI
REVKVITLKSKLVSDFRKDFQFYKVREINNYHHAHDAYLNAVVGTALIKK
YPKLESEFVYGDYKVYDVRKMIAKSEQEIGKATAKYFFYSNIMNFFKTEI
TLANGEIRKRPLIETNGETGEIVWDKGRDFATVRKVLSMPQVNIVKKTEV
QTGGFSKESILPKRNSDKLIARKKDWDPKKYGGFDSPTVAYSVLVVAKVE
KGKSKKLKSVKELLGITIMERSSFEKNPIDFLEAKGYKEVKKDLIIKLPK
YSLFELENGRKRMLASAGELQKGNELALPSKYVNFLYLASHYEKLKGSPE
DNEQKQLFVEQHKHYLDEIIEQISEFSKRVILADANLDKVLSAYNKHRDK
PIREQAENIIHLFTLTNLGAPAAFKYFDTTIDRKRYTSTKEVLDATLIHQ
SITGLYETRIDLSQLGGD
(single underline: HNH domain; double underline:
RuvC domain).

[0141] In some embodiments, the Cas9 domain comprises a D10A mutation, while the residue at position 840 remains a histidine in the amino acid sequence provided above, or at corresponding positions in any of the amino acid sequences provided herein.

[0142] In other embodiments, dCas9 variants having mutations other than D10A and H840A are provided, which, e.g., result in nuclease inactivated Cas9 (dCas9). Such mutations, by way of example, include other amino acid substitutions at D10 and H840, or other substitutions within the nuclease domains of Cas9 (e.g., substitutions in the HNH nuclease subdomain and/or the RuvC1 subdomain). In some embodiments, variants or homologues of dCas9 are provided which are at least about 70% identical, at least about 80% identical, at least about 90% identical, at least about 95% identical, at least about 98% identical, at least about 99% identical, at least about 99.5% identical, or at least about 99.9% identical. In some embodiments, variants of dCas9 are provided having amino acid sequences which are shorter, or longer, by about 5 amino acids, by about 10 amino acids, by about 15 amino acids, by about 20 amino acids, by about 25 amino acids, by about 30 amino acids, by about 40 amino acids, by about 50 amino acids, by about 75 amino acids, by about 100 amino acids or more.

[0143] In some embodiments, Cas9 fusion proteins as provided herein comprise the full-length amino acid sequence of a Cas9 protein, e.g., one of the Cas9 sequences provided herein. In other embodiments, however, fusion proteins as provided herein do not comprise a full-length Cas9 sequence, but only one or more fragments thereof. Exemplary amino acid sequences of suitable Cas9 domains and Cas9 fragments are provided herein, and additional suitable sequences of Cas9 domains and fragments will be apparent to those of skill in the art.

[0144] It should be appreciated that additional Cas9 proteins (e.g., a nuclease dead Cas9 (dCas9), a Cas9 nickase (nCas9), or a nuclease active Cas9), including variants and homologs thereof, are within the scope of this disclosure. Exemplary Cas9 proteins include, without limitation, those provided below. In some embodiments, the Cas9 protein is a nuclease dead Cas9 (dCas9). In some embodiments, the Cas9 protein is a Cas9 nickase (nCas9). In some embodiments, the Cas9 protein is a nuclease active Cas9.

Exemplary Catalytically Inactive Cas9 (dCas9):

(SEQ ID NO: 47)
DKKYSIGLAIGTNSVGWAVITDEYKVPSKKFKVLGNTDRHSIKKNLIGALLFDSGETAEATR
LKRTARRRYTRRKNRICYLQEIFSNEMAKVDDSFFHRLEESFLVEEDKKHERHPIFGNIVDE
VAYHEKYPTIYHLRKKLVDSTDKADLRLIYLALAHMIKFRGHFLIEGDLNPDNSDVDKLFIQ
LVQTYNQLFEENPINASGVDAKAILSARLSKSRRLENLIAQLPGEKKNGLFGNLIALSLGLT
PNFKSNFDLAEDAKLQLSKDTYDDDLDNLLAQIGDQYADLFLAAKNLSDAILLSDILRVNTE
ITKAPLSASMIKRYDEHHQDLTLLKALVRQQLPEKYKEIFFDQSKNGYAGYIDGGASQEEFY
KFIKPILEKMDGTEELLVKLNREDLLRKQRTFDNGSIPHQIHLGELHAILRRQEDFYPFLKD
NREKIEKILTFRIPYYVGPLARGNSRFAWMTRKSEETITPWNFEEVVDKGASAQSFIERMTN
FDKNLPNEKVLPKHSLLYEYFTVYNELTKVKYVTEGMRKPAFLSGEQKKAIVDLLFKTNRKV
TVKQLKEDYFKKIECFDSVEISGVEDRFNASLGTYHDLLKIIKDKDFLDNEENEDILEDIVL
TLTLFEDREMIEERLKTYAHLFDDKVMKQLKRRRYTGWGRLSRKLINGIRDKQSGKTILDFL
KSDGFANRNFMQLIHDDSLTFKEDIQKAQVSGQGDSLHEHIANLAGSPAIKKGILQTVKVVD
ELVKVMGRHKPENIVIEMARENQTTQKGQKNSRERMKRIEEGIKELGSQILKEHPVENTQLQ
NEKLYLYYLQNGRDMYVDQELDINRLSDYDVDAIVPQSFLKDDSIDNKVLTRSDKNRGKSDN
VPSEEVVKKMKNYWRQLLNAKLITQRKFDNLTKAERGGLSELDKAGFIKRQLVETRQITKHV
AQILDSRMNTKYDENDKLIREVKVITLKSKLVSDFRKDFQEYKVREINNYHHAHDAYLNAVV
GTALIKKYPKLESEFVYGDYKVYDVRKMIAKSEQEIGKATAKYFFYSNIMNFFKTEITLANG
EIRKRPLIETNGETGEIVWDKGRDFATVRKVLSMPQVNIVKKTEVQTGGFSKESILPKRNSD
KLIARKKDWDPKKYGGFDSPTVAYSVLVVAKVEKGKSKKLKSVKELLGITIMERSSFEKNPI
DFLEAKGYKEVKKDLIIKLPKYSLFELENGRKRMLASAGELQKGNELALPSKYVNFLYLASH
YEKLKGSPEDNEQKQLFVEQHKHYLDEIIEQISEFSKRVILADANLDKVLSAYNKHRDKPIR
EQAENIIHLFTLTNLGAPAAFKYFDTTIDRKRYTSTKEVLDATLIHQSITGLYETRIDLSQL
GGD
Exemplary catalytically Cas9 nickase (nCas9):
(SEQ ID NO: 48)
DKKYSIGLAIGTNSVGWAVITDEYKVPSKKFKVLGNTDRHSIKKNLIGALLFDSGETAEATR
LKRTARRRYTRRKNRICYLQEIFSNEMAKVDDSFFHRLEESFLVEEDKKHERHPIFGNIVDE
VAYHEKYPTIYHLRKKLVDSTDKADLRLIYLALAHMIKFRGHFLIEGDLNPDNSDVDKLFIQ
LVQTYNQLFEENPINASGVDAKAILSARLSKSRRLENLIAQLPGEKKNGLFGNLIALSLGLT
PNFKSNFDLAEDAKLQLSKDTYDDDLDNLLAQIGDQYADLFLAAKNLSDAILLSDILRVNTE
ITKAPLSASMIKRYDEHHQDLTLLKALVRQQLPEKYKEIFFDQSKNGYAGYIDGGASQEEFY
KFIKPILEKMDGTEELLVKLNREDLLRKQRTFDNGSIPHQIHLGELHAILRRQEDFYPFLKD
NREKIEKILTFRIPYYVGPLARGNSRFAWMTRKSEETITPWNFEEVVDKGASAQSFIERMTN
FDKNLPNEKVLPKHSLLYEYFTVYNELTKVKYVTEGMRKPAFLSGEQKKAIVDLLFKTNRKV
TVKQLKEDYFKKIECFDSVEISGVEDRFNASLGTYHDLLKIIKDKDFLDNEENEDILEDIVL
TLTLFEDREMIEERLKTYAHLFDDKVMKQLKRRRYTGWGRLSRKLINGIRDKQSGKTILDFL
KSDGFANRNFMQLIHDDSLTFKEDIQKAQVSGQGDSLHEHIANLAGSPAIKKGILQTVKVVD
ELVKVMGRHKPENIVIEMARENQTTQKGQKNSRERMKRIEEGIKELGSQILKEHPVENTQLQ
NEKLYLYYLQNGRDMYVDQELDINRLSDYDVDHIVPQSFLKDDSIDNKVLTRSDKNRGKSDN
VPSEEVVKKMKNYWRQLLNAKLITQRKFDNLTKAERGGLSELDKAGFIKRQLVETRQITKHV
AQILDSRMNTKYDENDKLIREVKVITLKSKLVSDFRKDFQFYKVREINNYHHAHDAYLNAVV
GTALIKKYPKLESEFVYGDYKVYDVRKMIAKSEQEIGKATAKYFFYSNIMNFFKTEITLANG
EIRKRPLIETNGETGEIVWDKGRDFATVRKVLSMPQVNIVKKTEVQTGGFSKESILPKRNSD
KLIARKKDWDPKKYGGFDSPTVAYSVLVVAKVEKGKSKKLKSVKELLGITIMERSSFEKNPI
DFLEAKGYKEVKKDLIIKLPKYSLFELENGRKRMLASAGELQKGNELALPSKYVNFLYLASH
YEKLKGSPEDNEQKQLFVEQHKHYLDEIIEQISEFSKRVILADANLDKVLSAYNKHRDKPIR
EQAENIIHLFTLTNLGAPAAFKYFDTTIDRKRYTSTKEVLDATLIHQSITGLYETRIDLSQL
GGD
Exemplary catalytically active Cas9:
(SEQ ID NO: 49)
DKKYSIGLDIGTNSVGWAVITDEYKVPSKKFKVLGNTDRHSIKKNLIGALLFDSGETAEATR
LKRTARRRYTRRKNRICYLQEIFSNEMAKVDDSFFHRLEESFLVEEDKKHERHPIFGNIVDE
VAYHEKYPTIYHLRKKLVDSTDKADLRLIYLALAHMIKFRGHFLIEGDLNPDNSDVDKLFIQ
LVQTYNQLFEENPINASGVDAKAILSARLSKSRRLENLIAQLPGEKKNGLFGNLIALSLGLT
PNFKSNFDLAEDAKLQLSKDTYDDDLDNLLAQIGDQYADLFLAAKNLSDAILLSDILRVNTE
ITKAPLSASMIKRYDEHHQDLTLLKALVRQQLPEKYKEIFFDQSKNGYAGYIDGGASQEEFY
KFIKPILEKMDGTEELLVKLNREDLLRKQRTFDNGSIPHQIHLGELHAILRRQEDFYPFLKD
NREKIEKILTFRIPYYVGPLARGNSRFAWMTRKSEETITPWNFEEVVDKGASAQSFIERMTN
FDKNLPNEKVLPKHSLLYEYFTVYNELTKVKYVTEGMRKPAFLSGEQKKAIVDLLFKTNRKV
TVKQLKEDYFKKIECFDSVEISGVEDRFNASLGTYHDLLKIIKDKDFLDNEENEDILEDIVL
TLTLFEDREMIEERLKTYAHLFDDKVMKQLKRRRYTGWGRLSRKLINGIRDKQSGKTILDFL
KSDGFANRNFMQLIHDDSLTFKEDIQKAQVSGQGDSLHEHIANLAGSPAIKKGILQTVKVVD
ELVKVMGRHKPENIVIEMARENQTTQKGQKNSRERMKRIEEGIKELGSQILKEHPVENTQLQ
NEKLYLYYLQNGRDMYVDQELDINRLSDYDVDHIVPQSFLKDDSIDNKVLTRSDKNRGKSDN
VPSEEVVKKMKNYWRQLLNAKLITQRKFDNLTKAERGGLSELDKAGFIKRQLVETRQITKHV
AQILDSRMNTKYDENDKLIREVKVITLKSKLVSDFRKDFQFYKVREINNYHHAHDAYLNAVV
GTALIKKYPKLESEFVYGDYKVYDVRKMIAKSEQEIGKATAKYFFYSNIMNFFKTEITLANG
EIRKRPLIETNGETGEIVWDKGRDFATVRKVLSMPQVNIVKKTEVQTGGFSKESILPKRNSD
KLIARKKDWDPKKYGGFDSPTVAYSVLVVAKVEKGKSKKLKSVKELLGITIMERSSFEKNPI
DFLEAKGYKEVKKDLIIKLPKYSLFELENGRKRMLASAGELQKGNELALPSKYVNFLYLASH
YEKLKGSPEDNEQKQLFVEQHKHYLDEIIEQISEFSKRVILADANLDKVLSAYNKHRDKPIR
EQAENIIHLFTLTNLGAPAAFKYFDTTIDRKRYTSTKEVLDATLIHQSITGLYETRIDLSQL
GGD.

[0145] In some embodiments, Cas9 refers to a Cas9 from archaea (e.g., nanoarchaea), which constitute a domain and kingdom of single-celled prokaryotic microbes. In some embodiments, Cas9 refers to CasX or CasY, which have been described in, for example, Burstein et al., “New CRISPR-Cas systems from uncultivated microbes.” Cell Res. 2017 Feb. 21. doi: 10.1038/cr.2017.21, the entire contents of which is hereby incorporated by reference. Using genome-resolved metagenomics, a number of CRISPR-Cas systems were identified, including the first reported Cas9 in the archaeal domain of life. This divergent Cas9 protein was found in little-studied nanoarchaea as part of an active CRISPR-Cas system. In bacteria, two previously unknown systems were discovered, CRISPR-CasX and CRISPR-CasY, which are among the most compact systems yet discovered. In some embodiments, Cas9 refers to CasX, or a variant of CasX. In some embodiments, Cas9 refers to a CasY, or a variant of CasY. It should be appreciated that other RNA-guided DNA binding proteins may be used as a nucleic acid programmable DNA binding protein (napDNAbp), and are within the scope of this disclosure.

[0146] In particular embodiments, napDNAbps useful in the methods of the invention include circular permutants, which are known in the art and described, for example, by Oakes et al., Cell 176, 254-267, 2019. An exemplary circular permutant follows where the bold sequence indicates sequence derived from Cas9, the italics sequence denotes a linker sequence, and the underlined sequence denotes a bipartite nuclear localization sequence, CP5 (with MSP “NGC=Pam Variant with mutations Regular Cas9 likes NGG” PID=Protein Interacting Domain and “D10A” nickase):

(SEQ ID NO: 38)
EIGKATAKYFFYSNIMNFFKTEITLANGEIRKRPLIETNGETGEIVWDKGRDFATVRKVLSM
PQVNIVKKTEVQTGGFSKESILPKRNSDKLIARKKDWDPKKYGGFMQPTVAYSVLVVAKVEK
GKSKKLKSVKELLGITIMERSSFEKNPIDFLEAKGYKEVKKDLIIKLPKYSLFELENGRKRM
LASAKFLQKGNELALPSKYVNFLYLASHYEKLKGSPEDNEQKQLFVEQHKHYLDEIIEQISE
FSKRVILADANLDKVLSAYNKHRDKPIREQAENIIHLFTLTNLGAPRAFKYFDTTIARKEYR
STKEVLDATLIHQSITGLYETRIDLSQLGGDGGSGGSGGSGGSGGSGGSGGMDKKYSIGLAI
GTNSVGWAVITDEYKVPSKKFKVLGNTDRHSIKKNLIGALLFDSGETAEATRLKRTARRRYT
RRKNRICYLQEIFSNEMAKVDDSFFHRLEESFLVEEDKKHERHPIFGNIVDEVAYHEKYPTI
YHLRKKLVDSTDKADLRLIYLALAHMIKFRGHFLIEGDLNPDNSDVDKLFIQLVQTYNQLFE
ENPINASGVDAKAILSARLSKSRRLENLIAQLPGEKKNGLFGNLIALSLGLTPNFKSNFDLA
EDAKLQLSKDTYDDDLDNLLAQIGDQYADLFLAAKNLSDAILLSDILRVNTEITKAPLSASM
IKRYDEHHQDLTLLKALVRQQLPEKYKEIFFDQSKNGYAGYIDGGASQEEFYKFIKPILEKM
DGTEELLVKLNREDLLRKQRTFDNGSIPHQIHLGELHAILRRQEDFYPFLKDNREKIEKILT
FRIPYYVGPLARGNSRFAWMTRKSEETITPWNFEEVVDKGASAQSFIERMTNFDKNLPNEKV
LPKHSLLYEYFTVYNELTKVKYVTEGMRKPAFLSGEQKKAIVDLLFKTNRKVTVKQLKEDYF
KKIECFDSVEISGVEDRFNASLGTYHDLLKIIKDKDFLDNEENEDILEDIVLTLTLFEDREM
IEERLKTYAHLFDDKVMKQLKRRRYTGWGRLSRKLINGIRDKQSGKTILDFLKSDGFANRNF
MQLIHDDSLTFKEDIQKAQVSGQGDSLHEHIANLAGSPAIKKGILQTVKVVDELVKVMGRHK
PENIVIEMARENQTTQKGQKNSRERMKRIEEGIKELGSQILKEHPVENTQLQNEKLYLYYLQ
NGRDMYVDQELDINRLSDYDVDHIVPQSFLKDDSIDNKVLTRSDKNRGKSDNVPSEEVVKKM
KNYWRQLLNAKLITQRKFDNLTKAERGGLSELDKAGFIKRQLVETRQITKHVAQILDSRMNT
KYDENDKLIREVKVITLKSKLVSDFRKDFQFYKVREINNYHHAHDAYLNAVVGTALIKKYPK
LESEFVYGDYKVYDVRKMIAKSEQEGADKRTADGSEFESPKKKRKV*

[0147] Non-limiting examples of a polynucleotide programmable nucleotide binding domain which can be incorporated into a base editor include a CRISPR protein-derived domain, a restriction nuclease, a meganuclease, TAL nuclease (TALEN), and a zinc finger nuclease (ZFN).

[0148] In some embodiments, the nucleic acid programmable DNA binding protein (napDNAbp) of any of the fusion proteins provided herein may be a CasX or CasY protein. In some embodiments, the napDNAbp is a CasX protein. In some embodiments, the napDNAbp is a CasY protein. In some embodiments, the napDNAbp comprises an amino acid sequence that is at least 85%, at least 90%, at least 91%, at least 92%, at least 93%, at least 94%, at least 95%, at least 96%, at least 97%, at least 98%, at least 99%, or at ease 99.5% identical to a naturally-occurring CasX or CasY protein. In some embodiments, the napDNAbp is a naturally-occurring CasX or CasY protein. In some embodiments, the napDNAbp comprises an amino acid sequence that is at least 85%, at least 90%, at least 91%, at least 92%, at least 93%, at least 94%, at least 95%, at least 96%, at least 97%, at least 98%, at least 99%, or at ease 99.5% identical to any CasX or CasY protein described herein. It should be appreciated that Cas12b/C2c1, CasX and CasY from other bacterial species may also be used in accordance with the present disclosure.

Cas12b/C2c1 (uniprot.org/uniprot/T0D7A2#2)
sp|TOD7A2|C2C1_ALIAG CRISPR-associated endo-nuclease C2c1 OS =
Alicyclobacillus acido-terrestris (strain ATCC 49025/DSM 3922/
CIP 106132/NCIMB 13137/GD3B) GN = c2c1 PE = 1 SV = 1
(SEQ ID NO: 50)
MAVKSIKVKLRLDDMPEIRAGLWKLHKEVNAGVRYYTEWLSLLRQENLYRRSPNGDGEQECD
KTAEECKAELLERLRARQVENGHRGPAGSDDELLQLARQLYELLVPQAIGAKGDAQQIARKF
LSPLADKDAVGGLGIAKAGNKPRWVRMREAGEPGWEEEKEKAETRKSADRTADVLRALADFG
LKPLMRVYTDSEMSSVEWKPLRKGQAVRTWDRDMFQQAIERMMSWESWNQRVGQEYAKLVEQ
KNRFEQKNFVGQEHLVHLVNQLQQDMKEASPGLESKEQTAHYVTGRALRGSDKVFEKWGKLA
PDAPFDLYDAEIKNVQRRNTRRFGSHDLFAKLAEPEYQALWREDASFLTRYAVYNSILRKLN
HAKMFATFTLPDATAHPIWTRFDKLGGNLHQYTFLFNEFGERRHAIRFHKLLKVENGVAREV
DDVTVPISMSEQLDNLLPRDPNEPIALYFRDYGAEQHFTGEFGGAKIQCRRDQLAHMHRRRG
ARDVYLNVSVRVQSQSEARGERRPPYAAVFRLVGDNHRAFVHFDKLSDYLAEHPDDGKLGSE
GLLSGLRVMSVDLGLRTSASISVFRVARKDELKPNSKGRVPFFFPIKGNDNLVAVHERSQLL
KLPGETESKDLRAIREERQRTLRQLRTQLAYLRLLVRCGSEDVGRRERSWAKLIEQPVDAAN
HMTPDWREAFENELQKLKSLHGICSDKEWMDAVYESVRRVWRHMGKQVRDWRKDVRSGERPK
IRGYAKDVVGGNSIEQIEYLERQYKFLKSWSFFGKVSGQVIRAEKGSRFAITLREHIDHAKE
DRLKKLADRIIMEALGYVYALDERGKGKWVAKYPPCQLILLEELSEYQFNNDRPPSENNQLM
QWSHRGVFQELINQAQVHDLLVGTMYAAFSSRFDARTGAPGIRCRRVPARCTQEHNPEPFPW
WLNKFVVEHTLDACPLRADDLIPTGEGEIFVSPFSAEEGDFHQIHADLNAAQNLQQRLWSDF
DISQIRLRCDWGEVDGELVLIPRLTGKRTADSYSNKVFYTNTGVTYYERERGKKRRKVFAQE
KLSEEEAELLVEADEAREKSVVLMRDPSGIINRGNWTRQKEFWSMV NQRIEGYLVKQIRSR
VPLQDSACENTGDI
CasX (uniprot.org/uniprot/F0NN87; uniprot.org/uniprot/F0NH53)
>tr|F0NN87|F0NN87_SULIH CRISPR-associated Casx protein OS =
Sulfolobus islandicus (strain HVE10/4) GN = SiH_0402 PE = 4
SV = 1
(SEQ ID NO: 51)
MEVPLYNIFGDNYIIQVATEAENSTIYNNKVEIDDEELRNVLNLAYKIAKNNEDAAAERRGK
AKKKKGEEGETTTSNIILPLSGNDKNPWTETLKCYNFPTTVALSEVFKNFSQVKECEEVSAP
SFVKPEFYEFGRSPGMVERTRRVKLEVEPHYLIIAAAGWVLTRLGKAKVSEGDYVGVNVFTP
TRGILYSLIQNVNGIVPGIKPETAFGLWIARKVVSSVTNPNVSVVRIYTISDAVGQNPTTIN
GGFSIDLTKLLEKRYLLSERLEAIARNALSISSNMRERYIVLANYIYEYLTG SKRLEDLLY
FANRDLIMNLNSDDGKVRDLKLISAYVNGELIRGEG
>tr|F0NH53|F0NH53_SULIR CRISPR associated protein, Casx OS =
Sulfolobus islandicus (strain REY15A) GN = SiRe_0771 PE = 4
SV = 1
(SEQ ID NO: 52)
MEVPLYNIFGDNYIIQVATEAENSTIYNNKVEIDDEELRNVLNLAYKIAKNNEDAAAERRGK
AKKKKGEEGETTTSNIILPLSGNDKNPWTETLKCYNFPTTVALSEVFKNFSQVKECEEVSAP
SFVKPEFYKFGRSPGMVERTRRVKLEVEPHYLIMAAAGWVLTRLGKAKVSEGDYVGVNVFTP
TRGILYSLIQNVNGIVPGIKPETAFGLWIARKVVSSVTNPNVSVVSIYTISDAVGQNPTTIN
GGFSIDLTKLLEKRDLLSERLEAIARNALSISSNMRERYIVLANYIYEYLTGSKRLEDLLYF
ANRDLIMNLNSDDGKVRDLKLISAYVNGELIRGEG
Deltaproteobacteria CasX
(SEQ ID NO: 53)
MEKRINKIRKKLSADNATKPVSRSGPMKTLLVRVMTDDLKKRLEKRRKKPEVMPQVISNNAA
NNLRMLLDDYTKMKEAILQVYWQEFKDDHVGLMCKFAQPASKKIDQNKLKPEMDEKGNLTTA
GFACSQCGQPLFVYKLEQVSEKGKAYTNYFGRCNVAEHEKLILLAQLKPVKDSDEAVTYSLG
KFGQRALDFYSIHVTKESTHPVKPLAQIAGNRYASGPVGKALSDACMGTIASFLSKYQDIII
EHQKVVKGNQKRLESLRELAGKENLEYPSVTLPPQPHTKEGVDAYNEVIARVRMWVNLNLWQ
KLKLSRDDAKPLLRLKGFPSFPVVERRENEVDWWNTINEVKKLIDAKRDMGRVFWSGVTAEK
RNTILEGYNYLPNENDHKKREGSLENPKKPAKRQFGDLLLYLEKKYAGDWGKVFDEAWERID
KKIAGLTSHIEREEARNAEDAQSKAVLTDWLRAKASFVLERLKEMDEKEFYACEIQLQKWYG
DLRGNPFAVEAENRVVDISGFSIGSDGHSIQYRNLLAWKYLENGKREFYLLMNYGKKGRIRF
TDGTDIKKSGKWQGLLYGGGKAKVIDLTFDPDDEQLIILPLAFGTRQGREFIWNDLLSLETG
LIKLANGRVIEKTIYNKKIGRDEPALFVALTFERREVVDPSNIKPVNLIGVARGENIPAVIA
LTDPEGCPLPEFKDSSGGPTDILRIGEGYKEKQRAIQAAKEVEQRRAGGYSRKFASKSRNLA
DDMVRNSARDLFYHAVTHDAVLVFANLSRGFGRQGKRTFMTERQYTKMEDWLTAKLAYEGLT
SKTYLSKTLAQYTSKTCSNCGFTITYADMDVMLVRLKKTSDGWATTLNNKELKAEYQITYYN
RYKRQTVEKELSAELDRLSEESGNNDISKWTKGRRDEALFLLKKRFSHRPVQEQFVCLDCGH
EVHAAEQAALNIARSWLFLNSNSTEFKSYKSGKQPFVGAWQAFYKRRLKEVWKPNA
CasY (ncbi.nlm.nih.gov/protein/APG80656.1)
>APG80656.1 CRISPR-associated protein CasY [uncultured
Parcubacteria group bacterium]
(SEQ ID NO: 54)
MSKRHPRISGVKGYRLHAQRLEYTGKSGAMRTIKYPLYSSPSGGRTVPREIVSAINDDYVGL
YGLSNFDDLYNAEKRNEEKVYSVLDFWYDCVQYGAVFSYTAPGLLKNVAEVRGGSYELTKTL
KGSHLYDELQIDKVIKFLNKKEISRANGSLDKLKKDIIDCFKAEYRERHKDQCNKLADDIKN
AKKDAGASLGERQKKLFRDFFGISEQSENDKPSFTNPLNLTCCLLPFDTVNNNRNRGEVLFN
KLKEYAQKLDKNEGSLEMWEYIGIGNSGTAFSNFLGEGFLGRLRENKITELKKAMMDITDAW
RGQEQEEELEKRLRILAALTIKLREPKFDNHWGGYRSDINGKLSSWLQNYINQTVKIKEDLK
GHKKDLKKAKEMINRFGESDTKEEAVVSSLLESIEKIVPDDSADDEKPDIPAIAIYRRFLSD
GRLTLNRFVQREDVQEALIKERLEAEKKKKPKKRKKKSDAEDEKETIDFKELFPHLAKPLKL
VPNFYGDSKRELYKKYKNAAIYTDALWKAVEKIYKSAFSSSLKNSFFDTDFDKDFFIKRLQK
IFSVYRRFNTDKWKPIVKNSFAPYCDIVSLAENEVLYKPKQSRSRKSAAIDKNRVRLPSTEN
IAKAGIALARELSVAGFDWKDLLKKEEHEEYIDLIELHKTALALLLAVTETQLDISALDFVE
NGTVKDFMKTRDGNLVLEGRFLEMFSQSIVFSELRGLAGLMSRKEFITRSAIQTMNGKQAEL
LYIPHEFQSAKITTPKEMSRAFLDLAPAEFATSLEPESLSEKSLLKLKQMRYYPHYFGYELT
RTGQGIDGGVAENALRLEKSPVKKREIKCKQYKTLGRGQNKIVLYVRSSYYQTQFLEWFLHR
PKNVQTDVAVSGSFLIDEKKVKTRWNYDALTVALEPVSGSERVFVSQPFTIFPEKSAEEEGQ
RYLGIDIGEYGIAYTALEITGDSAKILDQNFISDPQLKTLREEVKGLKLDQRRGTFAMPSTK
IARIRESLVHSLRNRIHHLALKHKAKIVYELEVSRFEEGKQKIKKVYATLKKADVYSEIDAD
KNLQTTVWGKLAVASEISASYTSQFCGACKKLWRAEMQVDETITTQELIGTVRVIKGGTLID
AIKDFMRPPIFDENDTPFPKYRDFCDKHHISKKMRGNSCLFICPFCRANADADIQASQTIAL
LRYVKEEKKVEDYFERFRKLKNIKVLGQMKKI

[0149] The term “Cas12” or “Cas12 domain” refers to an RNA guided nuclease comprising a Cas12 protein or a fragment thereof (e.g., a protein comprising an active, inactive, or partially active DNA cleavage domain of Cas12, and/or the gRNA binding domain of Cas12). Cas12 belongs to the class 2, Type V CRISPR/Cas system. A Cas12 nuclease is also referred to sometimes as a CRISPR (clustered regularly interspaced short palindromic repeat) associated nuclease. The sequence of an exemplary Bacillus hisashii Cas 12b (BhCas12b) Cas 12 domain is provided below:

(SEQ ID NO: 55)
MAPKKKRKVGIHGVPAAATRSFILKIEPNEEVKKGLWKTHEVLNHGIAYY
MNILKLIRQEAIYEHHEQDPKNPKKVSKAEIQAELWDFVLKMQKCNSFTH
EVDKDEVFNILRELYEELVPSSVEKKGEANQLSNKFLYPLVDPNSQSGKG
TASSGRKPRWYNLKIAGDPSWEEEKKKWEEDKKKDPLAKILGKLAEYGLI
PLFIPYTDSNEPIVKEIKWMEKSRNQSVRRLDKDMFIQALERFLSWESWN
LKVKEEYEKVEKEYKTLEERIKEDIQALKALEQYEKERQEQLLRDTLNTN
EYRLSKRGLRGWREIIQKWLKMDENEPSEKYLEVFKDYQRKHPREAGDYS
VYEFLSKKENHFIWRNHPEYPYLYATFCEIDKKKKDAKQQATFTLADPIN
HPLWVRFEERSGSNLNKYRILTEQLHTEKLKKKLTVQLDRLIYPTESGGW
EEKGKVDIVLLPSRQFYNQIFLDIEEKGKHAFTYKDESIKFPLKGTLGGA
RVQFDRDHLRRYPHKVESGNVGRIYFNMTVNIEPTESPVSKSLKIHRDDF
PKVVNFKPKELTEWIKDSKGKKLKSGIESLEIGLRVMSIDLGQRQAAAAS
IFEVVDQKPDIEGKLFFPIKGTELYAVHRASFNIKLPGETLVKSREVLRK
AREDNLKLMNQKLNFLRNVLHFQQFEDITEREKRVTKWISRQENSDVPLV
YQDELIQIRELMYKPYKDWVAFLKQLHKRLEVEIGKEVKHWRKSLSDGRK
GLYGISLKNIDEIDRTRKFLLRWSLRPTEPGEVRRLEPGQRFAIDQLNHL
NALKEDRLKKMANTIIMHALGYCYDVRKKKWQAKNPACQIILFEDLSNYN
PYEERSRFENSKLMKWSRREIPRQVALQGEIYGLQVGEVGAQFSSRFHAK
TGSPGIRCSVVTKEKLQDNRFFKNLQREGRLTLDKIAVLKEGDLYPDKGG
EKFISLSKDRKCVTTHADINAAQNLQKRFWTRTHGFYKVYCKAYQVDGQT
VYIPESKDQKQKIIEEFGEGYFILKDGVYEWVNAGKLKIKKGSSKQSSSE
LVDSDILKDSFDLASELKGEKLMLYRDPSGNVFPSDKWMAAGVFFGKLER
ILISKLTNQYSISTIEDDSSKQSMKRPAATKKAGQAKKKK.

[0150] Amino acid sequences having at least 85% or greater identity to the BhCas12b amino acid sequence are also useful in the methods of the invention.

[0151] By “cytidine deaminase” is meant a polypeptide or fragment thereof capable of catalyzing a deamination reaction that converts an amino group to a carbonyl group. In one embodiment, the cytidine deaminase converts cytosine to uracil or 5-methylcytosine to thymine. PmCDA1, which is derived from Petromyzon marinus (Petromyzon marinus cytosine deaminase 1, “PmCDA1”), AID (Activation-induced cytidine deaminase; AICDA), which is derived from a mammal (e.g., human, swine, bovine, horse, monkey etc.), and APOBEC are exemplary cytidine deaminases.

[0152] The term “conservative amino acid substitution” or “conservative mutation” refers to the replacement of one amino acid by another amino acid with a common property. A functional way to define common properties between individual amino acids is to analyze the normalized frequencies of amino acid changes between corresponding proteins of homologous organisms (Schulz, G. E. and Schirmer, R. H., Principles of Protein Structure, Springer-Verlag, New York (1979)). According to such analyses, groups of amino acids can be defined where amino acids within a group exchange preferentially with each other, and therefore resemble each other most in their impact on the overall protein structure (Schulz, G. E. and Schirmer, R. H., supra). Non-limiting examples of conservative mutations include amino acid substitutions of amino acids, for example, lysine for arginine and vice versa such that a positive charge can be maintained; glutamic acid for aspartic acid and vice versa such that a negative charge can be maintained; serine for threonine such that a free —OH can be maintained; and glutamine for asparagine such that a free —NH₂ can be maintained.

[0153] The term “coding sequence” or “protein coding sequence” as used interchangeably herein refers to a segment of a polynucleotide that codes for a protein. The region or sequence is bounded nearer the 5′ end by a start codon and nearer the 3′ end with a stop codon. Coding sequences can also be referred to as open reading frames.

[0154] The term “deaminase” or “deaminase domain,” as used herein, refers to a protein or enzyme that catalyzes a deamination reaction. In some embodiments, the deaminase is an adenosine deaminase, which catalyzes the hydrolytic deamination of adenine to hypoxanthine. In some embodiments, the deaminase is an adenosine deaminase, which catalyzes the hydrolytic deamination of adenosine or adenine (A) to inosine (I). In some embodiments, the deaminase or deaminase domain is an adenosine deaminase catalyzing the hydrolytic deamination of adenosine or deoxyadenosine to inosine or deoxyinosine, respectively. In some embodiments, the adenosine deaminase catalyzes the hydrolytic deamination of adenosine in deoxyribonucleic acid (DNA). The adenosine deaminases (e.g., engineered adenosine deaminases, evolved adenosine deaminases) provided herein can be from any organism, such as a bacterium. In some embodiments, the adenosine deaminase is from a bacterium, such as Escherichia coli, Staphylococcus aureus, Salmonella typhimurium, Shewanella putrefaciens, Haemophilus influenzae, or Caulobacter crescentus.

[0155] In some embodiments, the adenosine deaminase is a TadA deaminase. In some embodiments, the TadA deaminase is TadA variant. In some embodiments, the TadA variant is a TadA*8. In some embodiments, the deaminase or deaminase domain is a variant of a naturally occurring deaminase from an organism, such as a human, chimpanzee, gorilla, monkey, cow, dog, rat, or mouse. In some embodiments, the deaminase or deaminase domain does not occur in nature. For example, in some embodiments, the deaminase or deaminase domain is at least 50%, at least 55%, at least 60%, at least 65%, at least 70%, at least 75% at least 80%, at least 85%, at least 90%, at least 91%, at least 92%, at least 93%, at least 94%, at least 95%, at least 96%, at least 97%, at least 98%, at least 99%, at least 99.1%, at least 99.2%, at least 99.3%, at least 99.4%, at least 99.5%, at least 99.6%, at least 99.7%, at least 99.8%, or at least 99.9% identical to a naturally occurring deaminase. For example, deaminase domains are described in International PCT Application Nos. PCT/2017/045381 (WO 2018/027078) and PCT/US2016/058344 (WO 2017/070632), each of which is incorporated herein by reference for its entirety. Also, see Komor, A. C., et al., “Programmable editing of a target base in genomic DNA without double-stranded DNA cleavage” Nature 533, 420-424 (2016); Gaudelli, N. M., et al., “Programmable base editing of A•T to G•C in genomic DNA without DNA cleavage” Nature 551, 464-471 (2017); Komor, A. C., et al., “Improved base excision repair inhibition and bacteriophage Mu Gam protein yields C:G-to-T:A base editors with higher efficiency and product purity” Science Advances 3:eaao4774 (2017)), and Rees, H. A., et al., “Base editing: precision chemistry on the genome and transcriptome of living cells.” Nat Rev Genet. 2018 December; 19(12):770-788. doi: 10.1038/s41576-018-0059-1, the entire contents of which are hereby incorporated by reference.

[0156] “Detect” refers to identifying the presence, absence or amount of the analyte to be detected. In one embodiment, a sequence alteration in a polynucleotide or polypeptide is detected. In another embodiment, the presence of indels is detected.

[0157] By “detectable label” is meant a composition that when linked to a molecule of interest renders the latter detectable, via spectroscopic, photochemical, biochemical, immunochemical, or chemical means. For example, useful labels include radioactive isotopes, magnetic beads, metallic beads, colloidal particles, fluorescent dyes, electron-dense reagents, enzymes (for example, as commonly used in an enzyme linked immunosorbent assay (ELISA)), biotin, digoxigenin, or haptens.

[0158] By “disease” is meant any condition or disorder that damages or interferes with the normal function of a cell, tissue, or organ.

[0159] The term “effective amount,” as used herein, refers to an amount of a biologically active agent that is sufficient to elicit a desired biological response. The effective amount of an active agent(s) used to practice the present invention for therapeutic treatment of a disease varies depending upon the manner of administration, the age, body weight, and general health of the subject. Ultimately, the attending physician or veterinarian will decide the appropriate amount and dosage regimen. Such amount is referred to as an “effective” amount. In one embodiment, an effective amount is the amount of a base editor of the invention (e.g., a fusion protein comprising a programable DNA binding protein, a nucleobase editor and gRNA) sufficient to introduce an alteration in a gene of interest in a cell (e.g., a cell in vitro or in vivo). In some embodiments, an effective amount of a fusion protein provided herein, e.g., of a nucleobase editor comprising a nCas9 domain and a deaminase domain (e.g., adenosine deaminase or cytidine deaminase) may refer to the amount of the fusion protein that is sufficient to induce editing of a target site specifically bound and edited by the nucleobase editor. In one embodiment, an effective amount is the amount of a base editor required to achieve a therapeutic effect (e.g., to reduce or control a disease or a symptom or condition thereof). Such therapeutic effect need not be sufficient to alter a gene of interest in all cells of a subject, tissue or organ, but only to alter a gene of interest in about 1%, 5%, 10%, 25%, 50%, 75% or more of the cells present in a subject, tissue or organ.

[0160] In some embodiments, an effective amount of a fusion protein provided herein, e.g., of a nucleobase editor comprising a nCas9 domain and a deaminase domain (e.g., adenosine deaminase or cytidine deaminase) refers to the amount of the fusion protein that is sufficient to induce editing of a target site specifically bound and edited by the nucleobase editors described herein. As will be appreciated by the skilled artisan, the effective amount of an agent, e.g., a fusion protein, a nuclease, a hybrid protein, a protein dimer, a complex of a protein (or protein dimer) and a polynucleotide, or a polynucleotide, may vary depending on various factors as, for example, on the desired biological response, e.g., on the specific allele, genome, or target site to be edited, on the cell or tissue being targeted, and/or on the agent being used.

[0161] By “fragment” is meant a portion of a polypeptide or nucleic acid molecule. This portion contains, at least about 10%, 20%, 30%, 40%, 50%, 60%, 70%, 80%, or 90% of the entire length of the reference nucleic acid molecule or polypeptide. A fragment may contain 10, 20, 30, 40, 50, 60, 70, 80, 90, or 100, 200, 300, 400, 500, 600, 700, 800, 900, or 1000 nucleotides or amino acids.

[0162] By “guide RNA” or “gRNA” is meant a polynucleotide which can be specific for a target sequence and can form a complex with a polynucleotide programmable nucleotide binding domain protein (e.g., Cas9 or Cpf1). In an embodiment, the guide polynucleotide is a guide RNA (gRNA). gRNAs can exist as a complex of two or more RNAs, or as a single RNA molecule. gRNAs that exist as a single RNA molecule may be referred to as single-guide RNAs (sgRNAs), though “gRNA” is used interchangeably to refer to guide RNAs that exist as either single molecules or as a complex of two or more molecules. Typically, gRNAs that exist as single RNA species comprise two domains: (1) a domain that shares homology to a target nucleic acid (e.g., and directs binding of a Cas9 complex to the target); and (2) a domain that binds a Cas9 protein. In some embodiments, domain (2) corresponds to a sequence known as a tracrRNA, and comprises a stem-loop structure. For example, in some embodiments, domain (2) is identical or homologous to a tracrRNA as provided in Jinek et al., Science 337:816-821(2012), the entire contents of which is incorporated herein by reference. Other examples of gRNAs (e.g., those including domain 2) can be found in U.S. Provisional Patent Application, U.S. Ser. No. 61/874,682, filed Sep. 6, 2013, entitled “Switchable Cas9 Nucleases and Uses Thereof,” and U.S. Provisional Patent Application, U.S. Ser. No. 61/874,746, filed Sep. 6, 2013, entitled “Delivery System For Functional Nucleases,” the entire contents of each are hereby incorporated by reference in their entirety. In some embodiments, a gRNA comprises two or more of domains (1) and (2), and may be referred to as an “extended gRNA.” An extended gRNA will bind two or more Cas9 proteins and bind a target nucleic acid at two or more distinct regions, as described herein. The gRNA comprises a nucleotide sequence that complements a target site, which mediates binding of the nuclease/RNA complex to said target site, providing the sequence specificity of the nuclease:RNA complex.

[0163] “Hybridization” means hydrogen bonding, which may be Watson-Crick, Hoogsteen or reversed Hoogsteen hydrogen bonding, between complementary nucleobases. For example, adenine and thymine are complementary nucleobases that pair through the formation of hydrogen bonds.

[0164] The term “inhibitor of base repair” or “IBR” refers to a protein that is capable in inhibiting the activity of a nucleic acid repair enzyme, for example a base excision repair (BER) enzyme. In some embodiments, the IBR is an inhibitor of inosine base excision repair. Exemplary inhibitors of base repair include inhibitors of APE1, Endo III, Endo IV, Endo V, Endo VIII, Fpg, hOGGl, hNEILl, T7 Endol, T4PDG, UDG, hSMUGl, and hAAG. In some embodiments, the IBR is an inhibitor of Endo V or hAAG. In some embodiments, the IBR is a catalytically inactive EndoV or a catalytically inactive hAAG. In some embodiments, the base repair inhibitor is an inhibitor of Endo V or hAAG. In some embodiments, the base repair inhibitor is a catalytically inactive EndoV or a catalytically inactive hAAG.

[0165] In some embodiments, the base repair inhibitor is uracil glycosylase inhibitor (UGI). UGI refers to a protein that is capable of inhibiting a uracil-DNA glycosylase base-excision repair enzyme. In some embodiments, a UGI domain comprises a wild-type UGI or a fragment of a wild-type UGI. In some embodiments, the UGI proteins provided herein include fragments of UGI and proteins homologous to a UGI or a UGI fragment. In some embodiments, the base repair inhibitor is an inhibitor of inosine base excision repair. In some embodiments, the base repair inhibitor is a “catalytically inactive inosine specific nuclease” or “dead inosine specific nuclease. Without wishing to be bound by any particular theory, catalytically inactive inosine glycosylases (e.g., alkyl adenine glycosylase (AAG)) can bind inosine, but cannot create an abasic site or remove the inosine, thereby sterically blocking the newly formed inosine moiety from DNA damage/repair mechanisms. In some embodiments, the catalytically inactive inosine specific nuclease can be capable of binding an inosine in a nucleic acid but does not cleave the nucleic acid. Non-limiting exemplary catalytically inactive inosine specific nucleases include catalytically inactive alkyl adenosine glycosylase (AAG nuclease), for example, from a human, and catalytically inactive endonuclease V (EndoV nuclease), for example, from E. coli. In some embodiments, the catalytically inactive AAG nuclease comprises an E125Q mutation or a corresponding mutation in another AAG nuclease.

[0166] By “increases” is meant a positive alteration of at least 10%, 25%, 50%, 75%, or 100%.

[0167] An “intein” is a fragment of a protein that is able to excise itself and join the remaining fragments (the exteins) with a peptide bond in a process known as protein splicing. Inteins are also referred to as “protein introns.” The process of an intein excising itself and joining the remaining portions of the protein is herein termed “protein splicing” or “intein-mediated protein splicing.” In some embodiments, an intein of a precursor protein (an intein containing protein prior to intein-mediated protein splicing) comes from two genes. Such intein is referred to herein as a split intein (e.g., split intein-N and split intein-C). For example, in cyanobacteria, DnaE, the catalytic subunit a of DNA polymerase III, is encoded by two separate genes, dnaE-n and dnaE-c. The intein encoded by the dnaE-n gene may be herein referred as “intein-N.” The intein encoded by the dnaE-c gene may be herein referred as “intein-C.”

[0168] Other intein systems may also be used. For example, a synthetic intein based on the dnaE intein, the Cfa-N (e.g., split intein-N) and Cfa-C (e.g., split intein-C) intein pair, has been described (e.g., in Stevens et al., J Am Chem Soc. 2016 Feb. 24; 138(7):2162-5, incorporated herein by reference). Non-limiting examples of intein pairs that may be used in accordance with the present disclosure include: Cfa DnaE intein, Ssp GyrB intein, Ssp DnaX intein, Ter DnaE3 intein, Ter ThyX intein, Rma DnaB intein and Cne Prp8 intein (e.g., as described in U.S. Pat. No. 8,394,604, incorporated herein by reference.

Exemplary nucleotide and amino acid sequences of inteins are provided.

DnaE Intein-N DNA:
(SEQ ID NO: 56)
TGCCTGTCATACGAAACCGAGATACTGACAGTAGAATATGGCCTTCTGCC
AATCGGGAAGATTGTGGAGAAACGGATAGAATGCACAGTTTACTCTGTCG
ATAACAATGGTAACATTTATACTCAGCCAGTTGCCCAGTGGCACGACCGG
GGAGAGCAGGAAGTATTCGAATACTGTCTGGAGGATGGAAGTCTCATTAG
GGCCACTAAGGACCACAAATTTATGACAGTCGATGGCCAGATGCTGCCTA
TAGACGAAATCTTTGAGCGAGAGTTGGACCTCATGCGAGTTGACAACCTT
CCTAAT
DnaE Intein-N Protein:
(SEQ ID NO: 57)
CLSYETEILTVEYGLLPIGKIVEKRIECTVYSVDNNGNIYTQPVAQWHDR
GEQEVFEYCLEDGSLIRATKDHKFMTVDGQMLPIDEIFERELDLMRVDNL
PN
DnaE Intein-C DNA:
(SEQ ID NO: 58)
ATGATCAAGATAGCTACAAGGAAGTATCTTGGCAAACAAAACGTTTATGA
TATTGGAGTCGAAAGAGATCACAACTTTGCTCTGAAGAACGGATTCATAG
CTTCTAAT
Intein-C:
(SEQ ID NO: 59)
MIKIATRKYLGKQNVYDIGVERDHNFALKNGFIASN
Cfa-N DNA:
(SEQ ID NO: 60)
TGCCTGTCTTATGATACCGAGATACTTACCGTTGAATATGGCTTCTTGCC
TATTGGAAAGATTGTCGAAGAGAGAATTGAATGCACAGTATATACTGTAG
ACAAGAATGGTTTCGTTTACACACAGCCCATTGCTCAATGGCACAATCGC
GGCGAACAAGAAGTATTTGAGTACTGTCTCGAGGATGGAAGCATCATACG
AGCAACTAAAGATCATAAATTCATGACCACTGACGGGCAGATGTTGCCAA
TAGATGAGATATTCGAGCGGGGCTTGGATCTCAAACAAGTGGATGGATTG
CCA
Cfa-N Protein:
(SEQ ID NO: 61)
CLSYDTEILTVEYGFLPIGKIVEERIECTVYTVDKNGFVYTQPIAQWHNR
GEQEVFEYCLEDGSIIRATKDHKFMTTDGQMLPIDEIFERGLDLKQVDGL
P
Cfa-C DNA:
(SEQ ID NO: 62)
ATGAAGAGGACTGCCGATGGATCAGAGTTTGAATCTCCCAAGAAGAAGAG
GAAAGTAAAGATAATATCTCGAAAAAGTCTTGGTACCCAAAATGTCTATG
ATATTGGAGTGGAGAAAGATCACAACTTCCTTCTCAAGAACGGTCTCGTA
GCCAGCAAC
Cfa-C Protein:
(SEQ ID NO: 63)
MKRTADGSEFESPKKKRKVKIISRKSLGTQNVYDIGVEKDHNFLLKNGLV
ASN

[0169] Intein-N and intein-C may be fused to the N-terminal portion of the split Cas9 and the C-terminal portion of the split Cas9, respectively, for the joining of the N-terminal portion of the split Cas9 and the C-terminal portion of the split Cas9. For example, in some embodiments, an intein-N is fused to the C-terminus of the N-terminal portion of the split Cas9, i.e., to form a structure of N—[N-terminal portion of the split Cas9]-[intein-N]—C. In some embodiments, an intein-C is fused to the N-terminus of the C-terminal portion of the split Cas9, i.e., to form a structure of N-[intein-C]-[C-terminal portion of the split Cas9]-C. The mechanism of intein-mediated protein splicing for joining the proteins the inteins are fused to (e.g., split Cas9) is known in the art, e.g., as described in Shah et al., Chem Sci. 2014; 5(1):446-461, incorporated herein by reference. Methods for designing and using inteins are known in the art and described, for example by WO2014004336, WO2017132580, US20150344549, and US20180127780, each of which is incorporated herein by reference in their entirety.

[0170] The terms “isolated,” “purified,” or “biologically pure” refer to material that is free to varying degrees from components which normally accompany it as found in its native state. “Isolate” denotes a degree of separation from original source or surroundings. “Purify” denotes a degree of separation that is higher than isolation. A “purified” or “biologically pure” protein is sufficiently free of other materials such that any impurities do not materially affect the biological properties of the protein or cause other adverse consequences. That is, a nucleic acid or peptide of this invention is purified if it is substantially free of cellular material, viral material, or culture medium when produced by recombinant DNA techniques, or chemical precursors or other chemicals when chemically synthesized. Purity and homogeneity are typically determined using analytical chemistry techniques, for example, polyacrylamide gel electrophoresis or high-performance liquid chromatography. The term “purified” can denote that a nucleic acid or protein gives rise to essentially one band in an electrophoretic gel. For a protein that can be subjected to modifications, for example, phosphorylation or glycosylation, different modifications may give rise to different isolated proteins, which can be separately purified.

[0171] By “isolated polynucleotide” is meant a nucleic acid (e.g., a DNA) that is free of the genes which, in the naturally-occurring genome of the organism from which the nucleic acid molecule of the invention is derived, flank the gene. The term therefore includes, for example, a recombinant DNA that is incorporated into a vector; into an autonomously replicating plasmid or virus; or into the genomic DNA of a prokaryote or eukaryote; or that exists as a separate molecule (for example, a cDNA or a genomic or cDNA fragment produced by PCR or restriction endonuclease digestion) independent of other sequences. In addition, the term includes an RNA molecule that is transcribed from a DNA molecule, as well as a recombinant DNA that is part of a hybrid gene encoding additional polypeptide sequence.

[0172] By an “isolated polypeptide” is meant a polypeptide of the invention that has been separated from components that naturally accompany it. Typically, the polypeptide is isolated when it is at least 60%, by weight, free from the proteins and naturally-occurring organic molecules with which it is naturally associated. Preferably, the preparation is at least 75%, more preferably at least 90%, and most preferably at least 99%, by weight, a polypeptide of the invention. An isolated polypeptide of the invention may be obtained, for example, by extraction from a natural source, by expression of a recombinant nucleic acid encoding such a polypeptide; or by chemically synthesizing the protein. Purity can be measured by any appropriate method, for example, column chromatography, polyacrylamide gel electrophoresis, or by HPLC analysis.

[0173] The term “linker”, as used herein, can refer to a covalent linker (e.g., covalent bond), a non-covalent linker, a chemical group, or a molecule linking two molecules or moieties, e.g., two components of a protein complex or a ribonucleocomplex, or two domains of a fusion protein, such as, for example, a polynucleotide programmable DNA binding domain (e.g., dCas9) and a deaminase domain (e.g., an adenosine deaminase, a cytidine deaminase, or an adenosine deaminase and a cytidine deaminase) or a napDNAbp domain (e.g., Cas12b) and a deaminase domain (e.g., an adenosine deaminase or a cytidine deaminase). In particular embodiments, linkers flank a deaminase domain that is inserted within a Cas protein or fragment thereof. A linker can join different components of, or different portions of components of, a base editor system. For example, in some embodiments, a linker can join a guide polynucleotide binding domain of a polynucleotide programmable nucleotide binding domain and a catalytic domain of a deaminase. In some embodiments, a linker can join a CRISPR polypeptide and a deaminase. In some embodiments, a linker can join a Cas9 and a deaminase. In some embodiments, a linker can join a dCas9 and a deaminase. In some embodiments, a linker can join a nCas9 and a deaminase. For example, in some embodiments, a linker can join a Cas12a/Cpf1, Cas12b/C2c1, Cas12c/C2c3, Cas12d/CasY, Cas12e/CasX, Cas12g, Cas12 h, or Cas12i and a deaminase. In some embodiments, a linker can join a guide polynucleotide and a deaminase. In some embodiments, a linker can join a deaminating component and a polynucleotide programmable nucleotide binding component of a base editor system. In some embodiments, a linker can join an RNA-binding portion of a deaminating component and a napDNAbp component of a base editor system. In some embodiments, a linker can join an RNA-binding portion of a deaminating component and a polynucleotide programmable nucleotide binding component of a base editor system. In some embodiments, a linker can join an RNA-binding portion of a deaminating component and an RNA-binding portion of a polynucleotide programmable nucleotide binding component of a base editor system. A linker can be positioned between, or flanked by, two groups, molecules, or other moieties and connected to each one via a covalent bond or non-covalent interaction, thus connecting the two. In some embodiments, the linker can be an organic molecule, group, polymer, or chemical moiety. In some embodiments, the linker can be a polynucleotide. In some embodiments, the linker can be a DNA linker. In some embodiments, the linker can be an RNA linker. In some embodiments, a linker can comprise an aptamer capable of binding to a ligand. In some embodiments, the ligand may be carbohydrate, a peptide, a protein, or a nucleic acid. In some embodiments, the linker may comprise an aptamer may be derived from a riboswitch. The riboswitch from which the aptamer is derived may be selected from a theophylline riboswitch, a thiamine pyrophosphate (TPP) riboswitch, an adenosine cobalamin (AdoCbl) riboswitch, an S-adenosyl methionine (SAM) riboswitch, an SAH riboswitch, a flavin mononucleotide (FMN) riboswitch, a tetrahydrofolate riboswitch, a lysine riboswitch, a glycine riboswitch, a purine riboswitch, a GlmS riboswitch, or a pre-queosinel (PreQ1) riboswitch. In some embodiments, a linker may comprise an aptamer bound to a polypeptide or a protein domain, such as a polypeptide ligand. In some embodiments, the polypeptide ligand may be a K Homology (KH) domain, a MS2 coat protein domain, a PP7 coat protein domain, a SfMu Com coat protein domain, a sterile alpha motif, a telomerase Ku binding motif and Ku protein, a telomerase Sm7 binding motif and Sm7 protein, or an RNA recognition motif. In some embodiments, the polypeptide ligand may be a portion of a base editor system component. For example, a nucleobase editing component may comprise a deaminase domain and an RNA recognition motif.

[0174] In some embodiments, the linker can be an amino acid or a plurality of amino acids (e.g., a peptide or protein). In some embodiments, the linker can be about 5-100 amino acids in length, for example, about 5, 6, 7, 8, 9, 10, 11, 12, 13, 14, 15, 16, 17, 18, 19, 20, 20-30, 30-40, 40-50, 50-60, 60-70, 70-80, 80-90, or 90-100 amino acids in length. In some embodiments, the linker can be about 100-150, 150-200, 200-250, 250-300, 300-350, 350-400, 400-450, or 450-500 amino acids in length. Longer or shorter linkers can be also contemplated.

[0175] In some embodiments, a linker joins a gRNA binding domain of an RNA-programmable nuclease, including a Cas9 nuclease domain, and the catalytic domain of a nucleic-acid editing protein (e.g., cytidine or adenosine deaminase). In some embodiments, a linker joins a dCas9 and a nucleic-acid editing protein. For example, the linker is positioned between, or flanked by, two groups, molecules, or other moieties and connected to each one via a covalent bond, thus connecting the two. In some embodiments, the linker is an amino acid or a plurality of amino acids (e.g., a peptide or protein). In some embodiments, the linker is an organic molecule, group, polymer, or chemical moiety. In some embodiments, the linker is 5-200 amino acids in length, for example, 5, 6, 7, 8, 9, 10, 11, 12, 13, 14, 15, 16, 17, 18, 19, 20, 25, 35, 45, 50, 55, 60, 60, 65, 70, 70, 75, 80, 85, 90, 90, 95, 100, 101, 102, 103, 104, 105, 110, 120, 130, 140, 150, 160, 175, 180, 190, or 200 amino acids in length. Longer or shorter linkers are also contemplated.

[0176] In some embodiments, the domains of the nucleobase editor are fused via a linker that comprises the amino acid sequence of SGGSSGSETPGTSESATPESSGGS (SEQ ID NO: 64), SGGSSGGSSGSETPGTSESATPESSGGSSGGS (SEQ ID NO: 65), or GGSGGSPGSPAGSPTSTEEGTSESATPESGPGTSTEPSEGSAPGSPAGSPTSTEEGTSTE PSEGSAPGTSTEPSEGSAPGTSESATPESGPGSEPATSGGSGGS (SEQ ID NO: 66). In some embodiments, domains of the nucleobase editor are fused via a linker comprising the amino acid sequence SGSETPGTSESATPES (SEQ ID NO: 67), which may also be referred to as the XTEN linker. In some embodiments, a linker comprises the amino acid sequence SGGS (SEQ ID NO: 68). In some embodiments, a linker comprises (SGGS)n (SEQ ID NO: 69), (GGGS)ₙ (SEQ ID NO: 70), (GGGGS)ₙ (SEQ ID NO: 71), (G)ₙ (SEQ ID NO: 72), (EAAAK)ₙ (SEQ ID NO: 73), (GGS)ₙ (SEQ ID NO: 74), SGSETPGTSESATPES (SEQ ID NO: 67), or (XP)ₙ motif (SEQ ID NO: 75), or a combination of any of these, wherein n is independently an integer between 1 and 30, and wherein X is any amino acid. In some embodiments, n is 1, 2, 3, 4, 5, 6, 7, 8, 9, 10, 11, 12, 13, 14, or 15.

[0177] In some embodiments, the linker is 24 amino acids in length. In some embodiments, the linker comprises the amino acid sequence SGGSSGGSSGSETPGTSESATPES (SEQ ID NO: 76). In some embodiments, the linker is 40 amino acids in length. In some embodiments, the linker comprises the amino acid sequence SGGSSGGSSGSETPGTSESATPESSGGSSGGSSGGSSGGS (SEQ ID NO: 77). In some embodiments, the linker is 64 amino acids in length. In some embodiments, the linker comprises the amino acid sequence SGGSSGGSSGSETPGTSESATPESSGGSSGGSSGGSSGGSSGSETPGTSESATPESSGGS SGGS (SEQ ID NO: 78). In some embodiments, the linker is 92 amino acids in length. In some embodiments, the linker comprises the amino acid sequence

(SEQ ID NO: 79)
PGSPAGSPTSTEEGTSESATPESGPGTSTEPSEGSAPGSPAGSPTSTEEG
TSTEPSEGSAPGTSTEPSEGSAPGTSESATPESGPGSEPATS.

[0178] By “marker” is meant any protein or polynucleotide having an alteration in expression level or activity that is associated with a disease or disorder.

[0179] The term “mutation,” as used herein, refers to a substitution of a residue within a sequence, e.g., a nucleic acid or amino acid sequence, with another residue, or a deletion or insertion of one or more residues within a sequence. Mutations are typically described herein by identifying the original residue followed by the position of the residue within the sequence and by the identity of the newly substituted residue. Various methods for making the amino acid substitutions (mutations) provided herein are well known in the art, and are provided by, for example, Green and Sambrook, Molecular Cloning: A Laboratory Manual (4th ed., Cold Spring Harbor Laboratory Press, Cold Spring Harbor, N.Y. (2012)). In some embodiments, the presently disclosed base editors can efficiently generate an “intended mutation,” such as a point mutation, in a nucleic acid (e.g., a nucleic acid within a genome of a subject) without generating a significant number of unintended mutations, such as unintended point mutations. In some embodiments, an intended mutation is a mutation that is generated by a specific base editor (e.g., cytidine base editor or adenosine base editor) bound to a guide polynucleotide (e.g., gRNA), specifically designed to generate the intended mutation.

[0180] In general, mutations made or identified in a sequence (e.g., an amino acid sequence as described herein) are numbered in relation to a reference (or wild-type) sequence, i.e., a sequence that does not contain the mutations. The skilled practitioner in the art would readily understand how to determine the position of mutations in amino acid and nucleic acid sequences relative to a reference sequence.

[0181] The term “non-conservative mutations” involve amino acid substitutions between different groups, for example, lysine for tryptophan, or phenylalanine for serine, etc. In this case, it is preferable for the non-conservative amino acid substitution to not interfere with, or inhibit the biological activity of, the functional variant. The non-conservative amino acid substitution can enhance the biological activity of the functional variant, such that the biological activity of the functional variant is increased as compared to the wild-type protein.

[0182] The term “nuclear localization sequence,” “nuclear localization signal,” or “NLS” refers to an amino acid sequence that promotes import of a protein into the cell nucleus. Nuclear localization sequences are known in the art and described, for example, in Plank et al., International PCT application, PCT/EP2000/011690, filed Nov. 23, 2000, published as WO/2001/038547 on May 31, 2001, the contents of which are incorporated herein by reference for their disclosure of exemplary nuclear localization sequences. In other embodiments, the NLS is an optimized NLS described, for example, by Koblan et al., Nature Biotech. 2018 doi:10.1038/nbt.4172. In some embodiments, an NLS comprises the amino acid sequence KRTADGSEFESPKKKRKV (SEQ ID NO: 80), KRPAATKKAGQAKKKK (SEQ ID NO: 81), KKTELQTTNAENKTKKL (SEQ ID NO: 82), KRGINDRNFWRGENGRKTR (SEQ ID NO: 83), RKSGKIAAIVVKRPRK (SEQ ID NO: 84), PKKKRKV (SEQ ID NO: 85), or MDSLLMNRRKFLYQFKNVRWAKGRRETYLC (SEQ ID NO: 86).

[0183] The terms “nucleic acid” and “nucleic acid molecule,” as used herein, refer to a compound comprising a nucleobase and an acidic moiety, e.g., a nucleoside, a nucleotide, or a polymer of nucleotides. Typically, polymeric nucleic acids, e.g., nucleic acid molecules comprising three or more nucleotides are linear molecules, in which adjacent nucleotides are linked to each other via a phosphodiester linkage. In some embodiments, “nucleic acid” refers to individual nucleic acid residues (e.g., nucleotides and/or nucleosides). In some embodiments, “nucleic acid” refers to an oligonucleotide chain comprising three or more individual nucleotide residues. As used herein, the terms “oligonucleotide” and “polynucleotide” can be used interchangeably to refer to a polymer of nucleotides (e.g., a string of at least three nucleotides). In some embodiments, “nucleic acid” encompasses RNA as well as single and/or double-stranded DNA. Nucleic acids may be naturally occurring, for example, in the context of a genome, a transcript, an mRNA, tRNA, rRNA, siRNA, snRNA, a plasmid, cosmid, chromosome, chromatid, or other naturally occurring nucleic acid molecule. On the other hand, a nucleic acid molecule may be a non-naturally occurring molecule, e.g., a recombinant DNA or RNA, an artificial chromosome, an engineered genome, or fragment thereof, or a synthetic DNA, RNA, DNA/RNA hybrid, or including non-naturally occurring nucleotides or nucleosides. Furthermore, the terms “nucleic acid,” “DNA,” “RNA,” and/or similar terms include nucleic acid analogs, e.g., analogs having other than a phosphodiester backbone. Nucleic acids can be purified from natural sources, produced using recombinant expression systems and optionally purified, chemically synthesized, etc. Where appropriate, e.g., in the case of chemically synthesized molecules, nucleic acids can comprise nucleoside analogs such as analogs having chemically modified bases or sugars, and backbone modifications. A nucleic acid sequence is presented in the 5′ to 3′ direction unless otherwise indicated. In some embodiments, a nucleic acid is or comprises natural nucleosides (e.g., adenosine, thymidine, guanosine, cytidine, uridine, deoxyadenosine, deoxythymidine, deoxyguanosine, and deoxycytidine); nucleoside analogs (e.g., 2-aminoadenosine, 2-thiothymidine, inosine, pyrrolo-pyrimidine, 3-methyl adenosine, 5-methylcytidine, 2-aminoadenosine, C5-bromouridine, C5-fluorouridine, C5-iodouridine, C5-propynyl-uridine, C5-propynyl-cytidine, C5-methylcytidine, 2-aminoadenosine, 7-deazaadenosine, 7-deazaguanosine, 8-oxoadenosine, 8-oxoguanosine, O(6)-methylguanine, and 2-thiocytidine); chemically modified bases; biologically modified bases (e.g., methylated bases); intercalated bases; modified sugars (2′—e.g., fluororibose, ribose, 2′-deoxyribose, arabinose, and hexose); and/or modified phosphate groups (e.g., phosphorothioates and 5′-N-phosphoramidite linkages).

[0184] The term “nucleic acid programmable DNA binding protein” or “napDNAbp” may be used interchangeably with “polynucleotide programmable nucleotide binding domain” to refer to a protein that associates with a nucleic acid (e.g., DNA or RNA), such as a guide nucleic acid or guide polynucleotide (e.g., gRNA), that guides the napDNAbp to a specific nucleic acid sequence. In some embodiments, the polynucleotide programmable nucleotide binding domain is a polynucleotide programmable DNA binding domain. In some embodiments, the polynucleotide programmable nucleotide binding domain is a polynucleotide programmable RNA binding domain. In some embodiments, the polynucleotide programmable nucleotide binding domain is a Cas9 protein. A Cas9 protein can associate with a guide RNA that guides the Cas9 protein to a specific DNA sequence that is complementary to the guide RNA. In some embodiments, the napDNAbp is a Cas9 domain, for example a nuclease active Cas9, a Cas9 nickase (nCas9), or a nuclease inactive Cas9 (dCas9). Non-limiting examples of nucleic acid programmable DNA binding proteins include, Cas9 (e.g., dCas9 and nCas9), Cas12a/Cpf1, Cas12b/C2c1, Cas12c/C2c3, Cas12d/CasY, Cas12e/CasX, Cas12g, Cas12 h, and Cas12i. Non-limiting examples of Cas enzymes include Cas1, Cas1B, Cas2, Cas3, Cas4, Cas5, Cas5d, Cas5t, Cas5 h, Cas5a, Cas6, Cas7, Cas8, Cas8a, Cas8b, Cas8c, Cas9 (also known as Csn1 or Csx12), Cas10, Cas10d, Cas12a/Cpf1, Cas12b/C2c1, Cas12c/C2c3, Cas12d/CasY, Cas12e/CasX, Cas12g, Cas12 h, Cas12i, Csy1, Csy2, Csy3, Csy4, Cse1, Cse2, Cse3, Cse4, Cse5e, Csc1, Csc2, Csa5, Csn1, Csn2, Csm1, Csm2, Csm3, Csm4, Csm5, Csm6, Cmr1, Cmr3, Cmr4, Cmr5, Cmr6, Csb1, Csb2, Csb3, Csx17, Csx14, Csx10, Csx16, CsaX, Csx3, Csx1, Csx1S, Csx11, Csf1, Csf2, CsO, Csf4, Csd1, Csd2, Cst1, Cst2, Csh1, Csh2, Csa1, Csa2, Csa3, Csa4, Csa5, Type II Cas effector proteins, Type V Cas effector proteins, Type VI Cas effector proteins, CARF, DinG, homologues thereof, or modified or engineered versions thereof. Other nucleic acid programmable DNA binding proteins are also within the scope of this disclosure, although they may not be specifically listed in this disclosure. See, e.g., Makarova et al. “Classification and Nomenclature of CRISPR-Cas Systems: Where from Here?” CRISPR J. 2018 October; 1:325-336. doi: 10.1089/crispr.2018.0033; Yan et al., “Functionally diverse type V CRISPR-Cas systems” Science. 2019 Jan. 4; 363(6422):88-91. doi: 10.1126/science.aav7271, the entire contents of each are hereby incorporated by reference.

[0185] The term “nucleobase,” “nitrogenous base,” or “base,” used interchangeably herein, refers to a nitrogen-containing biological compound that forms a nucleoside, which in turn is a component of a nucleotide. The ability of nucleobases to form base pairs and to stack one upon another leads directly to long-chain helical structures such as ribonucleic acid (RNA) and deoxyribonucleic acid (DNA). Five nucleobases—adenine (A), cytosine (C), guanine (G), thymine (T), and uracil (U)—are called primary or canonical. Adenine and guanine are derived from purine, and cytosine, uracil, and thymine are derived from pyrimidine. DNA and RNA can also contain other (non-primary) bases that are modified. Non-limiting exemplary modified nucleobases can include hypoxanthine, xanthine, 7-methylguanine, 5,6-dihydrouracil, 5-methylcytosine (m5C), and 5-hydromethylcytosine. Hypoxanthine and xanthine can be created through mutagen presence, both of them through deamination (replacement of the amine group with a carbonyl group). Hypoxanthine can be modified from adenine. Xanthine can be modified from guanine. Uracil can result from deamination of cytosine. A “nucleoside” consists of a nucleobase and a five carbon sugar (either ribose or deoxyribose). Examples of a nucleoside include adenosine, guanosine, uridine, cytidine, 5-methyluridine (m5U), deoxyadenosine, deoxyguanosine, thymidine, deoxyuridine, and deoxycytidine. Examples of a nucleoside with a modified nucleobase includes inosine (I), xanthosine (X), 7-methylguanosine (m7G), dihydrouridine (D), 5-methylcytidine (m5C), and pseudouridine (Ψ). A “nucleotide” consists of a nucleobase, a five carbon sugar (either ribose or deoxyribose), and at least one phosphate group.

[0186] The term “nucleic acid programmable DNA binding protein” or “napDNAbp” refers to a protein that associates with a nucleic acid (e.g., DNA or RNA), such as a guide nucleic acid, that guides the napDNAbp to a specific nucleic acid sequence. For example, a Cas12 protein can associate with a guide RNA that guides the Cas12 protein to a specific DNA sequence that is complementary to the guide RNA. In some embodiments, the napDNAbp is a Cas12 domain, for example a nuclease active Cas12 domain. Examples of napDNAbps include, Cas12a/Cpf1, Cas12b/C2c1, Cas12c/C2c3, Cas12d/CasY, Cas12e/CasX, Cas12g, Cas12 h, and Cas12i. Other napDNAbps are also within the scope of this disclosure, although they may not be specifically listed in this disclosure. See, e.g., Makarova et al. “Classification and Nomenclature of CRISPR-Cas Systems: Where from Here?” CRISPR J. 2018 October; 1:325-336. doi: 10.1089/crispr.2018.0033; Yan et al., “Functionally diverse type V CRISPR-Cas systems” Science. 2019 Jan. 4; 363(6422):88-91. doi: 10.1126/science.aav7271, the entire contents of each are hereby incorporated by reference.

[0187] The terms “nucleobase editing domain” or “nucleobase editing protein,” as used herein, refers to a protein or enzyme that can catalyze a nucleobase modification in RNA or DNA, such as cytosine (or cytidine) to uracil (or uridine) or thymine (or thymidine), and adenine (or adenosine) to hypoxanthine (or inosine) deaminations, as well as non-templated nucleotide additions and insertions. In some embodiments, the nucleobase editing domain is a deaminase domain (e.g., an adenine deaminase or an adenosine deaminase; or a cytidine deaminase or a cytosine deaminase). In some embodiments, the nucleobase editing domain is more than one deaminase domain (e.g., an adenine deaminase or an adenosine deaminase and a cytidine or a cytosine deaminase). In some embodiments, the nucleobase editing domain can be a naturally occurring nucleobase editing domain. In some embodiments, the nucleobase editing domain can be an engineered or evolved nucleobase editing domain from the naturally occurring nucleobase editing domain. The nucleobase editing domain can be from any organism, such as a bacterium, human, chimpanzee, gorilla, monkey, cow, dog, rat, or mouse. For example, nucleobase editing proteins are described in International PCT Application Nos. PCT/2017/045381 (WO 2018/027078) and PCT/US2016/058344 (WO 2017/070632), each of which is incorporated herein by reference for its entirety. Also see, Komor, A. C., et al., “Programmable editing of a target base in genomic DNA without double-stranded DNA cleavage” Nature 533, 420-424 (2016); Gaudelli, N. M., et al., “Programmable base editing of A•T to G•C in genomic DNA without DNA cleavage” Nature 551, 464-471 (2017); and Komor, A. C., et al., “Improved base excision repair inhibition and bacteriophage Mu Gam protein yields C:G-to-T:A base editors with higher efficiency and product purity” Science Advances 3:eaao4774 (2017), the entire contents of which are hereby incorporated by reference.

[0188] As used herein, “obtaining” as in “obtaining an agent” includes synthesizing, purchasing, or otherwise acquiring the agent.

[0189] A “patient” or “subject” as used herein refers to a mammalian subject or individual diagnosed with, at risk of having or developing, or suspected of having or developing a disease or a disorder. In some embodiments, the term “patient” refers to a mammalian subject with a higher than average likelihood of developing a disease or a disorder. Exemplary patients can be humans, non-human primates, cats, dogs, pigs, cattle, cats, horses, camels, llamas, goats, sheep, rodents (e.g., mice, rabbits, rats, or guinea pigs) and other mammalians that can benefit from the therapies disclosed herein. Exemplary human patients can be male and/or female.

[0190] “Patient in need thereof” or “subject in need thereof” is referred to herein as a patient diagnosed with, at risk or having, predetermined to have, or suspected of having a disease or disorder.

[0191] The terms “pathogenic mutation,” “pathogenic variant,” “disease casing mutation,” “disease causing variant,” “deleterious mutation,” or “predisposing mutation” refers to a genetic alteration or mutation that increases an individual's susceptibility or predisposition to a certain disease or disorder. In some embodiments, the pathogenic mutation comprises at least one wild-type amino acid substituted by at least one pathogenic amino acid in a protein encoded by a gene.

[0192] The term “pharmaceutically-acceptable carrier” means a pharmaceutically-acceptable material, composition or vehicle, such as a liquid or solid filler, diluent, excipient, manufacturing aid (e.g., lubricant, talc magnesium, calcium or zinc stearate, or steric acid), or solvent encapsulating material, involved in carrying or transporting the compound from one site (e.g., the delivery site) of the body, to another site (e.g., organ, tissue or portion of the body). A pharmaceutically acceptable carrier is “acceptable” in the sense of being compatible with the other ingredients of the formulation and not injurious to the tissue of the subject (e.g., physiologically compatible, sterile, physiologic pH, etc.). The terms such as “excipient,” “carrier,” “pharmaceutically acceptable carrier,” “vehicle,” or the like are used interchangeably herein.

[0193] The term “pharmaceutical composition” can refer to a composition formulated for pharmaceutical use.

[0194] The terms “protein,” “peptide,” “polypeptide,” and their grammatical equivalents are used interchangeably herein, and refer to a polymer of amino acid residues linked together by peptide (amide) bonds. The terms refer to a protein, peptide, or polypeptide of any size, structure, or function. Typically, a protein, peptide, or polypeptide will be at least three amino acids long. A protein, peptide, or polypeptide can refer to an individual protein or a collection of proteins. One or more of the amino acids in a protein, peptide, or polypeptide can be modified, for example, by the addition of a chemical entity such as a carbohydrate group, a hydroxyl group, a phosphate group, a farnesyl group, an isofarnesyl group, a fatty acid group, a linker for conjugation, functionalization, or other modifications, etc. A protein, peptide, or polypeptide can also be a single molecule or can be a multi-molecular complex. A protein, peptide, or polypeptide can be just a fragment of a naturally occurring protein or peptide. A protein, peptide, or polypeptide can be naturally occurring, recombinant, or synthetic, or any combination thereof. The term “fusion protein” as used herein refers to a hybrid polypeptide which comprises protein domains from at least two different proteins. One protein can be located at the amino-terminal (N-terminal) portion of the fusion protein or at the carboxy-terminal (C-terminal) protein thus forming an amino-terminal fusion protein or a carboxy-terminal fusion protein, respectively. A protein can comprise different domains, for example, a nucleic acid binding domain (e.g., the gRNA binding domain of Cas9 that directs the binding of the protein to a target site) and a nucleic acid cleavage domain, or a catalytic domain of a nucleic acid editing protein. In some embodiments, a protein comprises a proteinaceous part, e.g., an amino acid sequence constituting a nucleic acid binding domain, and an organic compound, e.g., a compound that can act as a nucleic acid cleavage agent. In some embodiments, a protein is in a complex with, or is in association with, a nucleic acid, e.g., RNA or DNA. Any of the proteins provided herein can be produced by any method known in the art. For example, the proteins provided herein can be produced via recombinant protein expression and purification, which is especially suited for fusion proteins comprising a peptide linker. Methods for recombinant protein expression and purification are well known, and include those described by Green and Sambrook, Molecular Cloning: A Laboratory Manual (4th ed., Cold Spring Harbor Laboratory Press, Cold Spring Harbor, N.Y. (2012)), the entire contents of which are incorporated herein by reference.

[0195] Polypeptides and proteins disclosed herein (including functional portions and functional variants thereof) can comprise synthetic amino acids in place of one or more naturally-occurring amino acids. Such synthetic amino acids are known in the art, and include, for example, aminocyclohexane carboxylic acid, norleucine, α-amino n-decanoic acid, homoserine, S-acetylaminomethyl-cysteine, trans-3- and trans-4-hydroxyproline, 4-aminophenylalanine, 4-nitrophenylalanine, 4-chlorophenylalanine, 4-carboxyphenylalanine, β-phenylserine O-hydroxyphenylalanine, phenylglycine, α-naphthylalanine, cyclohexylalanine, cyclohexylglycine, indoline-2-carboxylic acid, 1,2,3,4-tetrahydroisoquinoline-3-carboxylic acid, aminomalonic acid, aminomalonic acid monoamide, N′-benzyl-N′-methyl-lysine, N′,N′-dibenzyl-lysine, 6-hydroxylysine, ornithine, α-aminocyclopentane carboxylic acid, α-aminocyclohexane carboxylic acid, α-aminocycloheptane carboxylic acid, α-(2-amino-2-norbornane)-carboxylic acid, α,γ-diaminobutyric acid, α,β-diaminopropionic acid, homophenylalanine, and α-tert-butylglycine. The polypeptides and proteins can be associated with post-translational modifications of one or more amino acids of the polypeptide constructs. Non-limiting examples of post-translational modifications include phosphorylation, acylation including acetylation and formylation, glycosylation (including N-linked and O-linked), amidation, hydroxylation, alkylation including methylation and ethylation, ubiquitylation, addition of pyrrolidone carboxylic acid, formation of disulfide bridges, sulfation, myristoylation, palmitoylation, isoprenylation, farnesylation, geranylation, glypiation, lipoylation and iodination.

[0196] The term “polynucleotide programmable nucleotide binding domain” or “nucleic acid programmable DNA binding protein (napDNAbp)” refers to a protein that associates with a nucleic acid (e.g., DNA or RNA), such as a guide polynucleotide (e.g., guide RNA), that guides the polynucleotide programmable nucleotide binding domain to a specific nucleic acid sequence. In some embodiments, the polynucleotide programmable nucleotide binding domain is a polynucleotide programmable DNA binding domain. In some embodiments, the polynucleotide programmable nucleotide binding domain is a polynucleotide programmable RNA binding domain. In some embodiments, the polynucleotide programmable nucleotide binding domain is a Cas12 protein.

[0197] The term “recombinant” as used herein in the context of proteins or nucleic acids refers to proteins or nucleic acids that do not occur in nature, but are the product of human engineering. For example, in some embodiments, a recombinant protein or nucleic acid molecule comprises an amino acid or nucleotide sequence that comprises at least one, at least two, at least three, at least four, at least five, at least six, or at least seven mutations as compared to any naturally occurring sequence.

[0198] By “reduces” is meant a negative alteration of at least 10%, 25%, 50%, 75%, or 100%.

[0199] By “reference” is meant a standard or control condition. In one embodiment, the reference is a wild-type or healthy cell. In other embodiments and without limitation, a reference is an untreated cell that is not subjected to a test condition, or is subjected to placebo or normal saline, medium, buffer, and/or a control vector that does not harbor a polynucleotide of interest.

[0200] A “reference sequence” is a defined sequence used as a basis for sequence comparison. A reference sequence may be a subset of or the entirety of a specified sequence; for example, a segment of a full-length cDNA or gene sequence, or the complete cDNA or gene sequence. For polypeptides, the length of the reference polypeptide sequence will generally be at least about 16 amino acids, at least about 20 amino acids, at least about 25 amino acids, about 35 amino acids, about 50 amino acids, or about 100 amino acids. For nucleic acids, the length of the reference nucleic acid sequence will generally be at least about 50 nucleotides, at least about 60 nucleotides, at least about 75 nucleotides, about 100 nucleotides or about 300 nucleotides or any integer thereabout or therebetween. In some embodiments, a reference sequence is a wild-type sequence of a protein of interest. In other embodiments, a reference sequence is a polynucleotide sequence encoding a wild-type protein.

[0201] The term “RNA-programmable nuclease,” and “RNA-guided nuclease” are used with (e.g., binds or associates with) one or more RNA(s) that is not a target for cleavage. In some embodiments, an RNA-programmable nuclease, when in a complex with an RNA, may be referred to as a nuclease:RNA complex. Typically, the bound RNA(s) is referred to as a guide RNA (gRNA). gRNAs can exist as a complex of two or more RNAs, or as a single RNA molecule. gRNAs that exist as a single RNA molecule may be referred to as single-guide RNAs (sgRNAs), though “gRNA” is used interchangeably to refer to guide RNAs that exist as either single molecules or as a complex of two or more molecules. Typically, gRNAs that exist as single RNA species comprise two domains: (1) a domain that shares homology to a target nucleic acid (e.g., and directs binding of a Cas9 complex to the target); and (2) a domain that binds a Cas9 protein. In some embodiments, domain (2) corresponds to a sequence known as a tracrRNA, and comprises a stem-loop structure. For example, in some embodiments, domain (2) is identical or homologous to a tracrRNA as provided in Jinek et ah, Science 337:816-821(2012), the entire contents of which is incorporated herein by reference. Other examples of gRNAs (e.g., those including domain 2) can be found in U.S. Provisional Patent Application, U.S. Ser. No. 61/874,682, filed Sep. 6, 2013, entitled “Switchable Cas9 Nucleases and Uses Thereof,” and U.S. Provisional Patent Application, U.S. Ser. No. 61/874,746, filed Sep. 6, 2013, entitled “Delivery System For Functional Nucleases,” the entire contents of each are hereby incorporated by reference in their entirety. In some embodiments, a gRNA comprises two or more of domains (1) and (2), and may be referred to as an “extended gRNA.” For example, an extended gRNA will, e.g., bind two or more Cas9 proteins and bind a target nucleic acid at two or more distinct regions, as described herein. The gRNA comprises a nucleotide sequence that complements a target site, which mediates binding of the nuclease/RNA complex to said target site, providing the sequence specificity of the nuclease:RNA complex.

[0202] In some embodiments, the RNA-programmable nuclease is the (CRISPR-associated system) Cas9 endonuclease, for example, Cas9 (Casnl) from Streptococcus pyogenes (see, e.g., “Complete genome sequence of an M1 strain of Streptococcus pyogenes.” Ferretti J. J., et al., Proc. Natl. Acad. Sci. U.S.A. 98:4658-4663(2001); “CRISPR RNA maturation by trans-encoded small RNA and host factor RNase III.” Deltcheva E., et al., Nature 471:602-607(2011).

[0203] Because RNA-programmable nucleases (e.g., Cas9) use RNA:DNA hybridization to target DNA cleavage sites, these proteins are able to be targeted, in principle, to any sequence specified by the guide RNA. Methods of using RNA-programmable nucleases, such as Cas9, for site-specific cleavage (e.g., to modify a genome) are known in the art (see e.g., Cong, L. et al., Multiplex genome engineering using CRISPR/Cas systems. Science 339, 819-823 (2013); Mali, P. et al., RNA-guided human genome engineering via Cas9. Science 339, 823-826 (2013); Hwang, W. Y. et al., Efficient genome editing in zebrafish using a CRISPR-Cas system. Nature biotechnology 31, 227-229 (2013); Jinek, M. et al., RNA-programmed genome editing in human cells. eLife 2, e00471 (2013); Dicarlo, J. E. et al., Genome engineering in Saccharomyces cerevisiae using CRISPR-Cas systems. Nucleic acids research (2013); Jiang, W. et al., RNA-guided editing of bacterial genomes using CRISPR-Cas systems. Nature biotechnology 31, 233-239 (2013); the entire contents of each of which are incorporated herein by reference).

[0204] The term “single nucleotide polymorphism (SNP)” is a variation in a single nucleotide that occurs at a specific position in the genome, where each variation is present to some appreciable degree within a population (e.g., >1%). For example, at a specific base position in the human genome, the C nucleotide can appear in most individuals, but in a minority of individuals, the position is occupied by an A. This means that there is a SNP at this specific position, and the two possible nucleotide variations, C or A, are said to be alleles for this position. SNPs underlie differences in susceptibility to disease. The severity of illness and the way our body responds to treatments are also manifestations of genetic variations. SNPs can fall within coding regions of genes, non-coding regions of genes, or in the intergenic regions (regions between genes). In some embodiments, SNPs within a coding sequence do not necessarily change the amino acid sequence of the protein that is produced, due to degeneracy of the genetic code. SNPs in the coding region are of two types: synonymous and nonsynonymous SNPs. Synonymous SNPs do not affect the protein sequence, while nonsynonymous SNPs change the amino acid sequence of protein. The nonsynonymous SNPs are of two types: missense and nonsense. SNPs that are not in protein-coding regions can still affect gene splicing, transcription factor binding, messenger RNA degradation, or the sequence of noncoding RNA. Gene expression affected by this type of SNP is referred to as an eSNP (expression SNP) and can be upstream or downstream from the gene. A single nucleotide variant (SNV) is a variation in a single nucleotide without any limitations of frequency and can arise in somatic cells. A somatic single nucleotide variation can also be called a single-nucleotide alteration.

[0205] By “specifically binds” is meant a nucleic acid molecule, polypeptide, or complex thereof (e.g., a nucleic acid programmable DNA binding domain and guide nucleic acid), compound, or molecule that recognizes and binds a polypeptide and/or nucleic acid molecule of the invention, but which does not substantially recognize and bind other molecules in a sample, for example, a biological sample.

[0206] Nucleic acid molecules useful in the methods of the invention include any nucleic acid molecule that encodes a polypeptide of the invention or a fragment thereof. Such nucleic acid molecules need not be 100% identical with an endogenous nucleic acid sequence, but will typically exhibit substantial identity. Polynucleotides having “substantial identity” to an endogenous sequence are typically capable of hybridizing with at least one strand of a double-stranded nucleic acid molecule. Nucleic acid molecules useful in the methods of the invention include any nucleic acid molecule that encodes a polypeptide of the invention or a fragment thereof. Such nucleic acid molecules need not be 100% identical with an endogenous nucleic acid sequence, but will typically exhibit substantial identity. Polynucleotides having “substantial identity” to an endogenous sequence are typically capable of hybridizing with at least one strand of a double-stranded nucleic acid molecule. By “hybridize” is meant pair to form a double-stranded molecule between complementary polynucleotide sequences (e.g., a gene described herein), or portions thereof, under various conditions of stringency. (See, e.g., Wahl, G. M. and S. L. Berger (1987) Methods Enzymol. 152:399; Kimmel, A. R. (1987) Methods Enzymol. 152:507).

[0207] For example, stringent salt concentration will ordinarily be less than about 750 mM NaCl and 75 mM trisodium citrate, preferably less than about 500 mM NaCl and 50 mM trisodium citrate, and more preferably less than about 250 mM NaCl and 25 mM trisodium citrate. Low stringency hybridization can be obtained in the absence of organic solvent, e.g., formamide, while high stringency hybridization can be obtained in the presence of at least about 35% formamide, and more preferably at least about 50% formamide. Stringent temperature conditions will ordinarily include temperatures of at least about 30° C., more preferably of at least about 37° C., and most preferably of at least about 42° C. Varying additional parameters, such as hybridization time, the concentration of detergent, e.g., sodium dodecyl sulfate (SDS), and the inclusion or exclusion of carrier DNA, are well known to those skilled in the art. Various levels of stringency are accomplished by combining these various conditions as needed. In a one: embodiment, hybridization will occur at 30° C. in 750 mM NaCl, 75 mM trisodium citrate, and 1% SDS. In another embodiment, hybridization will occur at 37° C. in 500 mM NaCl, 50 mM trisodium citrate, 1% SDS, 35% formamide, and 100 μg/ml denatured salmon sperm DNA (ssDNA). In another embodiment, hybridization will occur at 42° C. in 250 mM NaCl, 25 mM trisodium citrate, 1% SDS, 50% formamide, and 200 μg/ml ssDNA. Useful variations on these conditions will be readily apparent to those skilled in the art.

[0208] For most applications, washing steps that follow hybridization will also vary in stringency. Wash stringency conditions can be defined by salt concentration and by temperature. As above, wash stringency can be increased by decreasing salt concentration or by increasing temperature. For example, stringent salt concentration for the wash steps will preferably be less than about 30 mM NaCl and 3 mM trisodium citrate, and most preferably less than about 15 mM NaCl and 1.5 mM trisodium citrate. Stringent temperature conditions for the wash steps will ordinarily include a temperature of at least about 25° C., more preferably of at least about 42° C., and even more preferably of at least about 68° C. In an embodiment, wash steps will occur at 25° C. in 30 mM NaCl, 3 mM trisodium citrate, and 0.1% SDS. In a more preferred embodiment, wash steps will occur at 42 C in 15 mM NaCl, 1.5 mM trisodium citrate, and 0.1% SDS. In a more preferred embodiment, wash steps will occur at 68° C. in 15 mM NaCl, 1.5 mM trisodium citrate, and 0.1% SDS. Additional variations on these conditions will be readily apparent to those skilled in the art. Hybridization techniques are well known to those skilled in the art and are described, for example, in Benton and Davis (Science 196:180, 1977); Grunstein and Hogness (Proc. Natl. Acad. Sci., USA 72:3961, 1975); Ausubel et al. (Current Protocols in Molecular Biology, Wiley Interscience, New York, 2001); Berger and Kimmel (Guide to Molecular Cloning Techniques, 1987, Academic Press, New York); and Sambrook et al., Molecular Cloning: A Laboratory Manual, Cold Spring Harbor Laboratory Press, New York.

[0209] By “split” is meant divided into two or more fragments.

[0210] A “split Cas9 protein” or “split Cas9” refers to a Cas9 protein that is provided as an N-terminal fragment and a C-terminal fragment encoded by two separate nucleotide sequences.

[0211] The polypeptides corresponding to the N-terminal portion and the C-terminal portion of the Cas9 protein may be spliced to form a “reconstituted” Cas9 protein. In particular embodiments, the Cas9 protein is divided into two fragments within a disordered region of the protein, e.g., as described in Nishimasu et al., Cell, Volume 156, Issue 5, pp. 935-949, 2014, or as described in Jiang et al. (2016) Science 351: 867-871. PDB file: 5F9R, each of which is incorporated herein by reference. In some embodiments, the protein is divided into two fragments at any C, T, A, or S within a region of SpCas9 between about amino acids A292-G364, F445-K483, or E565-T637, or at corresponding positions in any other Cas9, Cas9 variant (e.g., nCas9, dCas9), or other napDNAbp. In some embodiments, protein is divided into two fragments at SpCas9 T310, T313, A456, 5469, or C574. In some embodiments, the process of dividing the protein into two fragments is referred to as “splitting” the protein.

[0212] In other embodiments, the N-terminal portion of the Cas9 protein comprises amino acids 1-573 or 1-637 S. pyogenes Cas9 wild-type (SpCas9) (NCBI Reference Sequence: NC_002737.2, Uniprot Reference Sequence: Q99ZW2) and the C-terminal portion of the Cas9 protein comprises a portion of amino acids 574-1368 or 638-1368 of SpCas9 wild-type.

[0213] The C-terminal portion of the split Cas9 can be joined with the N-terminal portion of the split Cas9 to form a complete Cas9 protein. In some embodiments, the C-terminal portion of the Cas9 protein starts from where the N-terminal portion of the Cas9 protein ends. As such, in some embodiments, the C-terminal portion of the split Cas9 comprises a portion of amino acids (551-651)-1368 of spCas9. “(551-651)-1368” means starting at an amino acid between amino acids 551-651 (inclusive) and ending at amino acid 1368. For example, the C-terminal portion of the split Cas9 may comprise a portion of any one of amino acid 551-1368, 552-1368, 553-1368, 554-1368, 555-1368, 556-1368, 557-1368, 558-1368, 559-1368, 560-1368, 561-1368, 562-1368, 563-1368, 564-1368, 565-1368, 566-1368, 567-1368, 568-1368, 569-1368, 570-1368, 571-1368, 572-1368, 573-1368, 574-1368, 575-1368, 576-1368, 577-1368, 578-1368, 579-1368, 580-1368, 581-1368, 582-1368, 583-1368, 584-1368, 585-1368, 586-1368, 587-1368, 588-1368, 589-1368, 590-1368, 591-1368, 592-1368, 593-1368, 594-1368, 595-1368, 596-1368, 597-1368, 598-1368, 599-1368, 600-1368, 601-1368, 602-1368, 603-1368, 604-1368, 605-1368, 606-1368, 607-1368, 608-1368, 609-1368, 610-1368, 611-1368, 612-1368, 613-1368, 614-1368, 615-1368, 616-1368, 617-1368, 618-1368, 619-1368, 620-1368, 621-1368, 622-1368, 623-1368, 624-1368, 625-1368, 626-1368, 627-1368, 628-1368, 629-1368, 630-1368, 631-1368, 632-1368, 633-1368, 634-1368, 635-1368, 636-1368, 637-1368, 638-1368, 639-1368, 640-1368, 641-1368, 642-1368, 643-1368, 644-1368, 645-1368, 646-1368, 647-1368, 648-1368, 649-1368, 650-1368, or 651-1368 of spCas9. In some embodiments, the C-terminal portion of the split Cas9 protein comprises a portion of amino acids 574-1368 or 638-1368 of SpCas9.

[0214] By “subject” is meant a mammal, including, but not limited to, a human or non-human mammal, such as a bovine, equine, canine, ovine, or feline. Subjects include livestock, domesticated animals raised to produce labor and to provide commodities, such as food, including without limitation, cattle, goats, chickens, horses, pigs, rabbits, and sheep.

[0215] By “substantially identical” is meant a polypeptide or nucleic acid molecule exhibiting at least 50% identity to a reference amino acid sequence (for example, any one of the amino acid sequences described herein) or nucleic acid sequence (for example, any one of the nucleic acid sequences described herein). In one embodiment, such a sequence is at least 60%, 80% or 85%, 90%, 95% or even 99% identical at the amino acid level or nucleic acid to the sequence used for comparison.

[0216] Sequence identity is typically measured using sequence analysis software (for example, Sequence Analysis Software Package of the Genetics Computer Group, University of Wisconsin Biotechnology Center, 1710 University Avenue, Madison, Wis. 53705, BLAST, BESTFIT, GAP, or PILEUP/PRETTYBOX programs). Such software matches identical or similar sequences by assigning degrees of homology to various substitutions, deletions, and/or other modifications. Conservative substitutions typically include substitutions within the following groups: glycine, alanine; valine, isoleucine, leucine; aspartic acid, glutamic acid, asparagine, glutamine; serine, threonine; lysine, arginine; and phenylalanine, tyrosine. In an exemplary approach to determining the degree of identity, a BLAST program may be used, with a probability score between e⁻³ and e⁻¹⁰⁰ indicating a closely related sequence.

COBALT is used, for example, with the following parameters:
[0217] a) alignment parameters: Gap penalties-11, -1 and End-Gap penalties-5, -1,
[0218] b) CDD Parameters: Use RPS BLAST on; Blast E-value 0.003; Find Conserved columns and Recompute on, and
[0219] c) Query Clustering Parameters: Use query clusters on; Word Size 4; Max cluster distance 0.8; Alphabet Regular.
   EMBOSS Needle is used, for example, with the following parameters:
[0220] a) Matrix: BLOSUM62;
[0221] b) GAP OPEN: 10;
[0222] c) GAP EXTEND: 0.5;
[0223] d) OUTPUT FORMAT: pair;
[0224] e) END GAP PENALTY: false;
[0225] f) END GAP OPEN: 10; and
[0226] g) END GAP EXTEND: 0.5.

[0227] The term “target site” refers to a sequence within a nucleic acid molecule that is modified by a nucleobase editor. In one embodiment, the target site is deaminated by a deaminase or a fusion protein comprising a deaminase (e.g., cytidine or adenine deaminase).

[0228] As used herein, the terms “treat,” treating,” “treatment,” and the like refer to reducing or ameliorating a disorder and/or symptoms associated therewith or obtaining a desired pharmacologic and/or physiologic effect. It will be appreciated that, although not precluded, treating a disorder or condition does not require that the disorder, condition or symptoms associated therewith be completely eliminated. In some embodiments, the effect is therapeutic, i.e., without limitation, the effect partially or completely reduces, diminishes, abrogates, abates, alleviates, decreases the intensity of, or cures a disease and/or adverse symptom attributable to the disease. In some embodiments, the effect is preventative, i.e., the effect protects or prevents an occurrence or reoccurrence of a disease or condition. To this end, the presently disclosed methods comprise administering a therapeutically effective amount of a compositions as described herein.

[0229] By “uracil glycosylase inhibitor” or “UGI” is meant an agent that inhibits the uracil-excision repair system. In one embodiment, the agent is a protein or fragment thereof that binds a host uracil-DNA glycosylase and prevents removal of uracil residues from DNA. In an embodiment, a UGI is a protein, a fragment thereof, or a domain that is capable of inhibiting a uracil-DNA glycosylase base-excision repair enzyme. In some embodiments, a UGI domain comprises a wild-type UGI or a modified version thereof. In some embodiments, a UGI domain comprises a fragment of the exemplary amino acid sequence set forth below. In some embodiments, a UGI fragment comprises an amino acid sequence that comprises at least 60%, at least 65%, at least 70%, at least 75%, at least 80%, at least 85%, at least 90%, at least 95%, at least 96%, at least 97%, at least 98%, at least 99%, or 100% of the exemplary UGI sequence provided below. In some embodiments, a UGI comprises an amino acid sequence that is homologous to the exemplary UGI amino acid sequence or fragment thereof, as set forth below. In some embodiments, the UGI, or a portion thereof, is at least 70%, at least 75%, at least 80%, at least 85%, at least 90%, at least 95%, at least 96%, at least 97%, at least 98%, at least 99%, at least 99.5%, at least 99.9%, or 100% identical to a wild-type UGI or a UGI sequence, or portion thereof, as set forth below. An exemplary UGI comprises an amino acid sequence as follows:

>splP14739IUNGI_BPPB2 Uracil-DNA glycosylase
inhibitor
(SEQ ID NO: 87)
MTNLSDIIEKETGKQLVIQESILMLPEEVEEVIGNKPESDILVHTAYDES
TDENVMLLTSDAPEYKPWALVIQDSNGENKIKML.

[0230] The term “vector” refers to a means of introducing a nucleic acid sequence into a cell, resulting in a transformed cell. Vectors include plasmids, transposons, phages, viruses, liposomes, and episome. “Expression vectors” are nucleic acid sequences comprising the nucleotide sequence to be expressed in the recipient cell. Expression vectors may include additional nucleic acid sequences to promote and/or facilitate the expression of the of the introduced sequence such as start, stop, enhancer, promoter, and secretion sequences.

[0231] Any compositions or methods provided herein can be combined with one or more of any of the other compositions and methods provided herein.

[0232] DNA editing has emerged as a viable means to modify disease states by correcting pathogenic mutations at the genetic level. Until recently, all DNA editing platforms have functioned by inducing a DNA double strand break (DSB) at a specified genomic site and relying on endogenous DNA repair pathways to determine the product outcome in a semi-stochastic manner, resulting in complex populations of genetic products. Though precise, user-defined repair outcomes can be achieved through the homology directed repair (HDR) pathway, a number of challenges have prevented high efficiency repair using HDR in therapeutically-relevant cell types. In practice, this pathway is inefficient relative to the competing, error-prone non-homologous end joining pathway. Further, HDR is tightly restricted to the G1 and S phases of the cell cycle, preventing precise repair of DSBs in post-mitotic cells. As a result, it has proven difficult or impossible to alter genomic sequences in a user-defined, programmable manner with high efficiencies in these populations.

[0233] Any compositions or methods provided herein can be combined with one or more of any of the other compositions and methods provided herein.

[0234] DNA editing has emerged as a viable means to modify disease states by correcting pathogenic mutations at the genetic level. Until recently, all DNA editing platforms have functioned by inducing a DNA double strand break (DSB) at a specified genomic site and relying on endogenous DNA repair pathways to determine the product outcome in a semi-stochastic manner, resulting in complex populations of genetic products. Though precise, user-defined repair outcomes can be achieved through the homology directed repair (HDR) pathway, a number of challenges have prevented high efficiency repair using HDR in therapeutically-relevant cell types. In practice, this pathway is inefficient relative to the competing, error-prone non-homologous end joining pathway. Further, HDR is tightly restricted to the G1 and S phases of the cell cycle, preventing precise repair of DSBs in post-mitotic cells. As a result, it has proven difficult or impossible to alter genomic sequences in a user-defined, programmable manner with high efficiencies in these populations.

### BRIEF DESCRIPTION OF THE DRAWINGS

[0235] FIGS. 1A-1C depict plasmids. FIG. 1A is an expression vector encoding a TadA7.10-dCas9 base editor. FIG. 1B is a plasmid comprising nucleic acid molecules encoding proteins that confer chloramphenicol resistance (CamR) and spectinomycin resistance (SpectR). The plasmid also comprises a kanamycin resistance gene disabled by two point mutations. FIG. 1C is a plasmid comprising nucleic acid molecules encoding proteins that confer chloramphenicol resistance (CamR) and spectinomycin resistance (SpectR). The plasmid also comprises a kanamycin resistance gene disabled by three point mutations.

[0236] FIG. 2 is an image of bacterial colonies transduced with the expression vectors depicted in FIG. 1, which included a defective kanamycin resistance gene. The vectors contained ABE7.10 variants that were generated using error prone PCR. Bacterial cells expressing these “evolved” ABE7.10 variants were selected for kanamycin resistance using increasing concentrations of kanamycin. Bacteria expressing ABE7.10 variants having adenosine deaminase activity were capable of correcting the mutations introduced into the kanamycin resistance gene, thereby restoring kanamycin resistance. The kanamycin resistant cells were selected for further analysis.

[0237] FIGS. 3A and 3B illustrate editing of a regulatory region of the hemoglobin subunit gamma (HGB1) locus, which is a therapeutically relevant site for upregulation of fetal hemoglobin. FIG. 3A is a drawing of a portion of the regulatory region for the HGB1 gene. FIG. 3A discloses SEQ ID NO: 440. FIG. 3B quantifies the efficiency and specificity of adenosine deaminase variants. Editing is assayed at the hemoglobin subunit gamma 1 (HGB1) locus in HEK293T cells, which is therapeutically relevant site for upregulation of fetal hemoglobin. The top panel depicts nucleotide residues in the target region of the regulatory sequence of the HGB1 gene. A5, A8, A9, and A11 denote the edited adenosine residues in HGB1. FIG. 3B discloses SEQ ID NO: 441.

[0238] FIG. 4 illustrates the relative effectiveness of adenosine base editors comprising a dCas9 that recognizes a noncanonical PAM sequence. The top panel depicts the coding sequence of the hemoglobin subunit. The bottom panel is a graph demonstrating the efficiency of adenosine deaminase variant base editors with guide RNAs of varying lengths. FIG. 4 discloses SEQ ID NOS 442-443, respectively, in order of appearance.

[0239] FIG. 5 is a graph illustrating the efficiency and specificity of ABE8 base editors. The percent editing at intended target nucleotides and unintended target nucleotides (bystanders) is quantified. FIG. 5 discloses SEQ ID NOS 444-445, respectively, in order of appearance.

[0240] FIG. 6 is a graph illustrating the efficiency and specificity of ABE8 base editors. The percent editing at intended target nucleotides and unintended target nucleotides (bystanders) is quantified.

[0241] FIGS. 7A-7D depict eighth generation adenine base editors mediate superior A•T to G•C conversion in human cells. FIG. 7A illustrates an overview of adenine base editing: i) ABE8 creates an R-loop at a sgRNA-targeted site in the genome; ii) TadA* deaminase chemically converts adenine to inosine via hydrolytic deamination on the ss-DNA portion of the R-loop; iii) D10A nickase of Cas9 nicks the strand opposite of the inosine containing strand; iv) the inosine containing strand can be used as a template during DNA replication; v) inosine preferentially base pairs with cytosine in the context of DNA polymerases; and vi) following replication, inosine may be replaced by guanosine. FIG. 7B illustrates the architecture of ABE8.x-m and ABE8.x-d. FIG. 7C illustrates three perspectives of the E. coli TadA deaminase (PDB 1Z3A) aligned with the S. aureus TadA (not shown) complexed with tRNAArg2 (PDB 2B3J). Mutations identified in eighth round of evolution are highlighted. FIG. 7D are graphs depicting A•T to G•C base editing efficiencies of core ABE8 constructs relative to ABE7.10 constructs in Hek293T cells across eight genomic sites. Values and error bars reflect the mean and s.d. of three independent biological replicates performed on different days.

[0242] FIGS. 8A-8C depict Cas9 PAM-variant ABE8s and catalytically dead Cas9 ABE8 variants mediate higher A•T to G•C conversion than corresponding ABE7.10 variants in human cells. Values and error bars reflect the mean and s.d. of three independent biological replicates performed on different days. FIG. 8A is a graph depicting A•T to G•C conversion in Hek293T cells with NG-Cas9 ABE8s (-NG PAM). FIG. 8B is a graph depiecting A•T to G•C conversion in Hek293T cells with Sa-Cas9 ABE8s (-NNGRRT PAM). FIG. 8C is a graph depiecting A•T to G•C conversion in Hek293T cells with catalytically inactivated, dCas9-ABE8s (D10A, H840A in S. pyogenes Cas9).

[0243] FIGS. 9A-9E depict the comparison between the on- and off-target editing frequencies between ABE7.10, ABEmax and ABEmax with one BPNLS in Hek293T cells. Individual data points are shown and error bars represent s.d. for n=3 independent biological replicates, performed on different days. FIGS. 9A and 9B are graphs that depict on-target DNA editing frequencies. FIGS. 9B and 9C are graphs that depict sgRNA-guided DNA-off-target editing frequencies. FIG. 9E is a graph depicting RNA off-target editing frequencies.

[0244] FIGS. 10A-10B depict the median A•T to G•C conversion and corresponding INDEL formation of TadA, C-terminal alpha-helix truncation ABE constructs in HEK293T cells. FIG. 10A is a heat map depicting A•T to G•C median editing conversion across 8 genomic sites. FIG. 10B is a heat map depicting INDEL formation. Delta residue value corresponds to deletion position in TadA. Median value generated from n=3 biological replicate.

[0245] FIG. 11 are heat maps depicting the median A•T to G•C conversion of 40 ABE8 constructs in HEK293T cells across 8 genomic sites. Median values were determined from two or greater biological replicates.

[0246] FIG. 12 is a heat map depicting median INDEL % of 40 ABE8 constructs in HEK293T cells across 8 genomic sites. Median values were determined from two or greater biological replicates.

[0247] FIG. 13 is a graph depicting fold change in editing, ABE8:ABE7. Representation of average ABE8:ABE7 A•T to G•C editing in Hek293T cells across all A positions within the target of eight different genomic sites. Positions 2-12 denote location of a target adenine within the 20-nt protospacer with position 20 directly 5′ of the -NGG PAM.

[0248] FIG. 14 depicts a dendrogram of ABE8s. Core ABE8 constructs selected for further studies highlighted in in black.

[0249] FIG. 15 are heat maps depicting median A•T to G•C conversion of core eight ABE8 constructs in HEK293T cells across 8 genomic sites. Median values were determined from three or greater biological replicates.

[0250] FIG. 16 is a heat map depicting median INDEL frequency of core 8 ABE8s tested at 8 genomic sites in HEK293T cells.

[0251] FIG. 17 are heat maps depicting median A•T to G•C conversion of core NG-ABE8 constructs 9 (-NG PAM) at six genomic sites in HEK293T cells. Median value generated from n=3 biological replicate.

[0252] FIG. 18 is a heat map depicting median INDEL frequency of core NG-ABE8s tested at six genomic sites in HEK293T cells. Median value generated from n=3 biological replicate.

[0253] FIG. 19 are heat maps depicting median A•T to G•C conversion of core Sa-ABE8 constructs (-NNGRRT PAM) at six genomic sites in HEK293T cells. Site positions are numbered −2 to 20 (5′ to 3′) within the 22-nt protospacer. Position 20 is 5′ to the NNGRRT PAM. Median value generated from n=3 biological replicate.

[0254] FIG. 20 is a heat map depicting median INDEL frequency of core Sa-ABE8s tested at 8 genomic sites in HEK293T cells. Median value generated from n=3 biological replicate.

[0255] FIG. 21 are heat maps depicting median A•T to G•C conversion of core dC9-ABE8-m constructs at eight genomic sites in HEK293T cells. Dead Cas9 (dC9) is defined as D10A and H840A mutations within S. pyogenes Cas9. Median value generated from n>3 biological replicate.

[0256] FIG. 22 are heat maps depicting median A•T to G•C conversion of core dC9-ABE8-d constructs at eight genomic sites in HEK293T cells. Dead Cas9 (dC9) is defined as D10A and H840A mutations within S. pyogenes Cas9. Median value generated from n>3 biological replicate.

[0257] FIGS. 23A and 23B depict Median INDEL frequency of core dC9-ABE8s tested at 8 genomic sites in HEK293T cells. Median value generated from n>3 biological replicate. FIG. 23A is a heat map depicting indel frequency shown for dC9-ABE8-m variants relative to ABE7.10. FIG. 23B is a heat map depicting indel frequency shown for dC9-ABE8-d variants relative to ABE7.10.

[0258] FIG. 24 is a graph depicting C•G to T•A editing with Hek293T cells treated with ABE8s and ABE7.10. Editing frequencies for each site averaged across all C positions within the target. Cytosines within the protospacer are indicted with shading. FIG. 24 discloses SEQ ID NOS 446-451, respectively, in order of appearance.

[0259] FIGS. 25A-25H depict DNA on-target and sgRNA-dependent DNA off-target editing by ABE8 constructs and ABE8 constructs with TadA mutations to improve specificity for DNA. Individual data points are shown and error bars represent s.d. for n=3 independent biological replicates, performed on different days. FIGS. 25A and 25B are graph depicting on-target DNA editing frequencies for core ABE8 constructs as compared to ABE7. FIGS. 25C and 25D are graphs depicting on-target DNA editing frequencies for ABE8 with mutations that improve RNA off-target editing. FIGS. 25E and 25F are graphs depicting sgRNA-guided DNA-off-target editing frequencies for core ABE 8 constructs as compared to ABE7. FIGS. 25G and 25H are graphs depicting sgRNA-guided DNA-off-target editing frequencies for ABE 8 constructs with mutations that improve RNA off-target editing.

[0260] FIG. 26 is a graph depicting indel frequencies at 12 previously identified sgRNA-dependent Cas9 off-target loci in human cells Individual data points are shown and error bars represent s.d. for n=3 independent biological replicates, performed on different days.

[0261] FIGS. 27A and 27B depict A•T to G•C conversion and phenotypic outcomes in primary cells. FIG. 27A is a graph depicting A•T to G•C conversion at −198 HBG1/2 site in CD34+ cells treated with ABE from two separate donors. NGS analysis conducted at 48 and 144 h post treatment. −198 HBG1/2 target sequence shown with A7 highlighted. Percent A•T to G•C plotted for A7. FIG. 27A discloses SEQ ID NO: 452. FIG. 27B is a graph depicting percentage of γ-globin formed as a fraction of alpha-globin. Values shown from two different donors, post ABE treatment and erythroid differentiation.

[0262] FIGS. 28A and 28B depict A•T to G•C conversion of CD34+ cells treated with ABE8 at the −198 promoter site upstream of HBG1/2. FIG. 28A is a heat map depicting A to G editing frequency of ABE8s in CD34+ cells from two donors, where Donor 2 is heterozygous for sickle cell disease, at 48 and 144 h post editor treatment. FIG. 28B is a graphical representation of distribution of total sequencing reads which contain either A7 only edits or combined (A7+A8) edits.

[0263] FIG. 29 is a heat map depicting INDEL frequency of CD34+ cells treated with ABE8 at the −198 site of the gamma-globin promoter. Frequencies shown from two donors at 48 h and 144 h time points.

[0264] FIG. 30 depicts an UHPLC UV-Vis trace (220 nm) and integration of globin chain levels of untreated differentiated CD34+ cells (donor 1).

[0265] FIG. 31 depicts an UHPLC UV-Vis trace (220 nm) and integration of globin chain levels of differentiated CD34+ cells treated with ABE7.10-m (donorl)

[0266] FIG. 32 depicts an UHPLC UV-Vis trace (220 nm) and integration of globin chain levels of differentiated CD34+ cells treated with ABE7.10-d (donorl).

[0267] FIG. 33 depicts an UHPLC UV-Vis trace (220 nm) and integration of globin chain levels of differentiated CD34+ cells treated with ABE8.8-m (donorl) FIG. 34 depicts an UHPLC UV-Vis trace (220 nm) and integration of globin chain levels of differentiated CD34+ cells treated with ABE8.8-d (donorl).

[0268] FIG. 35 depicts an UHPLC UV-Vis trace (220 nm) and integration of globin chain levels of differentiated CD34+ cells treated with ABE8.13-m (donorl).

[0269] FIG. 36 depicts an UHPLC UV-Vis trace (220 nm) and integration of globin chain levels of differentiated CD34+ cells treated with ABE8.13-d (donorl).

[0270] FIG. 37 depicts an UHPLC UV-Vis trace (220 nm) and integration of globin chain levels of differentiated CD34+ cells treated with ABE8.17-m (donorl).

[0271] FIG. 38 depicts an UHPLC UV-Vis trace (220 nm) and integration of globin chain levels of differentiated CD34+ cells treated with ABE8.17-d (donorl).

[0272] FIG. 39 depicts an UHPLC UV-Vis trace (220 nm) and integration of globin chain levels of differentiated CD34+ cells treated with ABE8.20-m (donorl).

[0273] FIG. 40 depicts an UHPLC UV-Vis trace (220 nm) and integration of globin chain levels of differentiated CD34+ cells treated with ABE8.20-d (donor 1).

[0274] FIG. 41 depicts an UHPLC UV-Vis trace (220 nm) and integration of globin chain levels of differentiated CD34+ cells untreated (donor 2). Note: donor 2 is heterozygous for sickle cell disease.

[0275] FIG. 42 depicts an UHPLC UV-Vis trace (220 nm) and integration of globin chain levels of differentiated CD34+ cells treated with ABE7.10-m (donor 2). Note: donor 2 is heterozygous for sickle cell disease.

[0276] FIG. 43 depicts an UHPLC UV-Vis trace (220 nm) and integration of globin chain levels of differentiated CD34+ cells treated with ABE7.10-d (donor 2). Note: donor 2 is heterozygous for sickle cell disease.

[0277] FIG. 44 depicts an UHPLC UV-Vis trace (220 nm) and integration of globin chain levels of differentiated CD34+ cells treated with ABE8.8-m (donor 2). Note: donor 2 is heterozygous for sickle cell disease.

[0278] FIG. 45 depicts an UHPLC UV-Vis trace (220 nm) and integration of globin chain levels of differentiated CD34+ cells treated with ABE8.8-d (donor 2). Note: donor 2 is heterozygous for sickle cell disease.

[0279] FIG. 46 depicts an UHPLC UV-Vis trace (220 nm) and integration of globin chain levels of differentiated CD34+ cells treated with ABE8.13-m (donor 2). Note: donor 2 is heterozygous for sickle cell disease.

[0280] FIG. 47 depicts an UHPLC UV-Vis trace (220 nm) and integration of globin chain levels of differentiated CD34+ cells treated with ABE8.13-d (donor 2). Note: donor 2 is heterozygous for sickle cell disease.

[0281] FIG. 48 depicts an UHPLC UV-Vis trace (220 nm) and integration of globin chain levels of differentiated CD34+ cells treated with ABE8.17-m (donor 2). Note: donor 2 is heterozygous for sickle cell disease.

[0282] FIG. 49 depicts an UHPLC UV-Vis trace (220 nm) and integration of globin chain levels of differentiated CD34+ cells treated with ABE8.17-d (donor 2). Note: donor 2 is heterozygous for sickle cell disease.

[0283] FIG. 50 depicts an UHPLC UV-Vis trace (220 nm) and integration of globin chain levels of differentiated CD34+ cells treated with ABE8.20-m (donor 2). Note: donor 2 is heterozygous for sickle cell disease.

[0284] FIG. 51A-51E depict editing with ABE8.8 at two independent sites reached over 90% editing on day 11 post erythroid differentiation before enucleation and about 60% of gamma globin over alpha globin or total beta family globin on day 18 post erythroid differentiation. FIG. 51A is a graph depicting an average of ABE8.8 editing in 2 healthy donors in 2 independent experiments. Editing efficiency was measured with primers that distinguish HBG1 and HBG2. FIG. 51B is a graph depicting an average of 1 healthy donor in 2 independent experiments. Editing efficiency was measured with primers that recognize both HBG1 and HBG2. FIG. 51C is a graph depicting editing of ABE8.8 in a donor with heterozygous E6V mutation. FIGS. 51D and 51E are graphs depicting gamma globin increase in the ABE8.8 edited cells.

[0285] FIGS. 52A and 52B depict percent editing using ABE variants to correct sickle cell mutations. FIG. 52A is a graph depicting a screen of different editor variants with about 70% editing in SCD patient fibroblasts. FIG. 52B is a graph depicting CD34 cells from healthy donors edited with a lead ABE variant, targeting a synonymous mutation A13 in an adjacent proline that resides within the editing window and serves as a proxy for editing the SCD mutation. ABE8 variants showed an average editing frequency around 40% at the proxy A13.

[0286] FIGS. 53A and 53B depict RNA amplicon sequencing to detect cellular A-to-I editing in RNA associated with ABE treatment. Individual data points are shown and error bars represent s.d. for n=3 independent biological replicates, performed on different days. FIG. 53A is a graph depicting A-to-I editing frequencies in targeted RNA amplicons for core ABE 8 constructs as compared to ABET and Cas9(D10A) nickase control. FIG. 53B is a graph depicting A-to-I editing frequencies in targeted RNA amplicons for ABE8 with mutations that have been reported to improve RNA off-target editing.

[0287] FIG. 54 is a schematic diagram illustrating the loss of dopamine that results from the loss of dopaminergic neurons in Parkinson Disease.

[0288] FIG. 55 is a schematic diagram showing a guide RNA and target sequences for the correction of R1441C and R1441H mutations in LRRK2 associated with Parkinson's Disease. FIG. 55 discloses SEQ ID NOS 453-454, respectively, in order of appearance.

[0289] FIG. 56 is a schematic diagram showing target sequences for correction of the Y1699C, G2019S, and 12020 mutations in LRRK2 associated with Parkinson's Disease. FIG. 56 discloses SEQ ID NOS 290 and 455-457, respectively, in order of appearance.

[0290] FIG. 57A-57C provides a graph, a schematic diagram, and a table. FIG. 57A quantifies the percent conversion of A to G at nucleic acid position 7 of the LRRK2 target sequence. The editors used are designated PV1-PV14, a description of this which is provided below. pCMV designates the CMV promoter; bpNLS designates a bipartite Nuclear Localization Signal; monoABE8.1 designates a monomeric form of the ABE8.1 base editor.

[0291] FIG. 57B depicts target sequences and guide RNA for correction of the R1441C mutation in LRRK2 associated with Parkinson's Disease. FIG. 57B discloses SEQ ID NOS 458-459, respectively, in order of appearance. FIG. 57C shows the percent conversion of A to G at nucleic acid position 7 of the LRRK2 target sequence. Editors PV1-14 were used to edit LRRK2 R1441C. Editors (15-28) were used to edit G2109. The editors (PV1-28) used for correction of the LRRK2 mutations follows:

PV1 (also termed PV15).
pCMV_monoABE8.1_bpNLS + Y147T
(SEQ ID NO: 21)
MSEVEFSHEYWMRHALTLAKRARDEREVPVGAVLVLNNRVIGEGWNRAIG
LHDPTAHAEIMALRQGGLVMQNYRLIDATLYVTFEPCVMCAGAMIHSRIG
RVVFGVRNAKTGAAGSLMDVLHYPGMNHRVEITEGILADECAALLCTFFR
MPRQVFNAQKKAQSSTD
PV2 (also termed PV16).
pCMV_monoABE8.1_bpNLS + Y147R
(SEQ ID NO: 88)
MSEVEFSHEYWMRHALTLAKRARDEREVPVGAVLVLNNRVIGEGWNRAIG
LHDPTAHAEIMALRQGGLVMQNYRLIDATLYVTFEPCVMCAGAMIHSRIG
RVVFGVRNAKTGAAGSLMDVLHYPGMNHRVEITEGILADECAALLCRFFR
MPRQVFNAQKKAQSSTD
PV3 (also termed PV17).
pCMV_monoABE8.1_bpNLS + Q154S
(SEQ ID NO: 89)
MSEVEFSHEYWMRHALTLAKRARDEREVPVGAVLVLNNRVIGEGWNRAIG
LHDPTAHAEIMALRQGGLVMQNYRLIDATLYVTFEPCVMCAGAMIHSRIG
RVVFGVRNAKTGAAGSLMDVLHYPGMNHRVEITEGILADECAALLCYFFR
MPRSVFNAQKKAQSSTD
PV4 (also termed PV18).
pCMV_monoABE8.1_bpNLS + Y123H
(SEQ ID NO: 90)
MSEVEFSHEYWMRHALTLAKRARDEREVPVGAVLVLNNRVIGEGWNRAIG
LHDPTAHAEIMALRQGGLVMQNYRLIDATLYVTFEPCVMCAGAMIHSRIG
RVVFGVRNAKTGAAGSLMDVLHHPGMNHRVEITEGILADECAALLCYFFR
MPRQVFNAQKKAQSSTD
PV5 (also termed PV19).
pCMV_monoABE8.1_bpNLS + V82S
(SEQ ID NO: 91)
MSEVEFSHEYWMRHALTLAKRARDEREVPVGAVLVLNNRVIGEGWNRAIG
LHDPTAHAEIMALRQGGLVMQNYRLIDATLYSTFEPCVMCAGAMIHSRIG
RVVFGVRNAKTGAAGSLMDVLHYPGMNHRVEITEGILADECAALLCYFFR
MPRQVFNAQKKAQSSTD
PV6 (also termed PV20).
pCMV_monoABE8.1_bpNLS + T166R
(SEQ ID NO: 92)
MSEVEFSHEYWMRHALTLAKRARDEREVPVGAVLVLNNRVIGEGWNRAIG
LHDPTAHAEIMALRQGGLVMQNYRLIDATLYVTFEPCVMCAGAMIHSRIG
RVVFGVRNAKTGAAGSLMDVLHYPGMNHRVEITEGILADECAALLCYFFR
MPRQVFNAQKKAQSSRD
PV7 (also termed PV21).
pCMV_monoABE8.1_bpNLS + Q154R
(SEQ ID NO: 93)
MSEVEFSHEYWMRHALTLAKRARDEREVPVGAVLVLNNRVIGEGWNRAIG
LHDPTAHAEIMALRQGGLVMQNYRLIDATLYVTFEPCVMCAGAMIHSRIG
RVVFGVRNAKTGAAGSLMDVLHYPGMNHRVEITEGILADECAALLCYFFR
MPRRVFNAQKKAQSSTD
PV8 (also termed PV22).
pCMV_monoABE8.1_bpNLS + Y147R_Q154R_Y123H
(SEQ ID NO: 94)
MSEVEFSHEYWMRHALTLAKRARDEREVPVGAVLVLNNRVIGEGWNRAIG
LHDPTAHAEIMALRQGGLVMQNYRLIDATLYVTFEPCVMCAGAMIHSRIG
RVVFGVRNAKTGAAGSLMDVLHHPGMNHRVEITEGILADECAALLCRFFR
MPRRVFNAQKKAQSSTD
PV9 (also termed PV23).
pCMV_monoABE8.1_bpNLS + Y147R_Q154R_I76Y
(SEQ ID NO: 95)
MSEVEFSHEYWMRHALTLAKRARDEREVPVGAVLVLNNRVIGEGWNRAIG
LHDPTAHAEIMALRQGGLVMQNYRLYDATLYVTFEPCVMCAGAMIHSRIG
RVVFGVRNAKTGAAGSLMDVLHYPGMNHRVEITEGILADECAALLCRFFR
MPRRVFNAQKKAQSSTD
PV10 (also termed PV24).
pCMV_monoABE8.1_bpNLS + Y147R_Q154R_T166R
(SEQ ID NO: 96)
MSEVEFSHEYWMRHALTLAKRARDEREVPVGAVLVLNNRVIGEGWNRAIG
LHDPTAHAEIMALRQGGLVMQNYRLIDATLYVTFEPCVMCAGAMIHSRIG
RVVFGVRNAKTGAAGSLMDVLHYPGMNHRVEITEGILADECAALLCRFFR
MPRRVFNAQKKAQSSRD
PV11 (also termed PV25).
pCMV_monoABE8.1_bpNLS + Y147T_Q154R
(SEQ ID NO: 97)
MSEVEFSHEYWMRHALTLAKRARDEREVPVGAVLVLNNRVIGEGWNRAIG
LHDPTAHAEIMALRQGGLVMQNYRLIDATLYVTFEPCVMCAGAMIHSRIG
RVVFGVRNAKTGAAGSLMDVLHYPGMNHRVEITEGILADECAALLCTFFR
MPRRVFNAQKKAQSSTD
PV12 (also termed PV26).
pCMV_monoABE8.1_bpNLS + Y147T_Q154S
(SEQ ID NO: 98)
MSEVEFSHEYWMRHALTLAKRARDEREVPVGAVLVLNNRVIGEGWNRAIG
LHDPTAHAEIMALRQGGLVMQNYRLIDATLYVTFEPCVMCAGAMIHSRIG
RVVFGVRNAKTGAAGSLMDVLHYPGMNHRVEITEGILADECAALLCTFFR
MPRSVFNAQKKAQSSTD
PV13 (also termed PV27).
pCMV_monoABE8.1_bpNLS + H123Y123H_Y147R_Q154R_I76Y
(SEQ ID NO: 99)
MSEVEFSHEYWMRHALTLAKRARDEREVPVGAVLVLNNRVIGEGWNRAIG
LHDPTAHAEIMALRQGGLVMQNYRLYDATLYVTFEPCVMCAGAMIHSRIG
RVVFGVRNAKTGAAGSLMDVLHHPGMNHRVEITEGILADECAALLCRFFR
MPRRVFNAQKKAQSSTD
PV14 (also termed PV28).
pCMV_monoABE8.1_bpNLS + V82S + Q154R
(SEQ ID NO: 100)
MSEVEFSHEYWMRHALTLAKRARDEREVPVGAVLVLNNRVIGEGWNRAIG
LHDPTAHAEIMALRQGGLVMQNYRLIDATLYSTFEPCVMCAGAMIHSRIG
RVVFGVRNAKTGAAGSLMDVLHYPGMNHRVEITEGILADECAALLCYFFR
MPRRVFNAQKKAQSSTD

[0292] FIG. 58A-58C provides a graph, a schematic diagram, and a table. FIG. 58A quantifies the percent conversion of A to G at nucleic acid position 6 of the LRRK2 target sequence. The editors used are designated PV15-PV28, a description of this which is provided above. pCMV designates the CMV promoter; bpNLS designates a bipartite Nuclear Localization Signal; monoABE8.1 designates a monomeric form of the ABE8.1 base editor. FIG. 58B depicts target sequences and guide RNAs for correction of the G2019S mutation in LRRK2 associated with Parkinson's Disease. FIG. 58B discloses SEQ ID NOS 460-461, respectively, in order of appearance. FIG. 58C shows the percent conversion of A to G at nucleic acid positions 4 and 6 of the LRRK2 target sequence. The A to G transition at position 4 is a bystander effect.

[0293] FIGS. 59A-59L depicts the sequence reads for the A to G transition at position 7 of the LRRK2 target sequence, which encodes R1441C (See FIG. 57A-57C). The editor is indicated (PV1-14). A description of PV1-28 is provided at FIG. 56.

[0294] FIGS. 60A-60W depicts the sequence reads for the A to G transition at positions 4 and 6 of the LRRK2 target sequence, which encodes G2019S (See FIG. 58A-58C).

[0295] FIG. 61A provides a schematic diagram depicting the target sequence for correction of a pathogenic mutation A419V in LRRK2, which is encoded by an antisense strand G>A mutation. The mutation is corrected using an ABE targeting the A at position 12 using an SpCas9 variant that has specificity for a TGG PAM. FIG. 61A discloses SEQ ID NOS 462-463, respectively, in order of appearance.

[0296] FIG. 61B provides a schematic diagram depicting the target sequence for correction of a pathogenic mutation L1114L in LRRK2, which is associated with Parkinson Disease. The mutation is an antisense strand T>C, which is corrected using a base editor having cytidine deaminase activity (CBE). FIG. 61B discloses SEQ ID NOS 464-465, respectively, in order of appearance.

[0297] FIG. 61C provides a schematic diagram depicting the target sequence for correction of a pathogenic mutation I1122V in LRRK2, which is associated with Parkinson Disease. The mutation is an antisense strand T>C, which is corrected using a base editor having cytidine deaminase activity (CBE). FIG. 61C discloses SEQ ID NOS 466-467, respectively, in order of appearance.

[0298] FIG. 61D provides a schematic diagram depicting the target sequence for correction of a pathogenic mutation M1869V in LRRK2, which is associated with Parkinson Disease. The mutation is an antisense strand T>C, which is corrected using a base editor having cytidine deaminase activity (CBE). FIG. 61D discloses SEQ ID NOS 468-469, respectively, in order of appearance.

[0299] FIGS. 62A and 62B depict the precise base editing correction of the Mus musculus IDUA W401X mutation in HEK293T cells. FIG. 62A is a graph depicting the percentage of base editing of the Mus musculus IDUA W401X mutation using ABE8 base editor variants using a 21-nucleotide guide RNA. FIG. 62B is a graph depicting the percent indels for the ABE8 base editor variants using a 21-nucleotide guide RNA.

[0300] FIG. 63 is a graph depicting the percentage of base editing of the Mus musculus IDUA W401X mutation using ABE8 base editor variants using either a 20-nucleotide guide RNA or a 21-nucleotide guide RNA.

[0301] FIG. 64 depicts a diagramic illustration of the Homo sapiens IDUA genomic nucleic acid and amino acid sequence as a target for A-to-G nucleotide base editing to correct the W402X mutation. Also shown in the figure is the nucleic acid sequence of a corresponding guide RNA (gRNA). Noted in the figure is the target adenosine (A) nucleobase (boxed) in the IDUA nucleic acid sequence. FIG. 64 discloses SEQ ID NOS 470-472, respectively, in order of appearance.

[0302] FIGS. 65A and 65B depict the precise base editing correction of the Homo sapiens IDUA W402X mutation in HEK293T cells. FIG. 65A is a graph depicting the percentage of base editing of the Homo sapiens IDUA W402X mutation using ABE8 base editor variants using a 20-nucleotide guide RNA. FIG. 65B is a graph depicting the percent indels for the ABE8 base editor variants using a 20-nucleotide guide RNA.

[0303] FIGS. 66A through 66O are tables depicting the efficiency of percentage of A-to-G nucleotide change in the IDUA nucleic acid sequence using ABE8 base editor variants, as detected by deep sequencing (MySeq) following PCR of the genomic DNA in cells in which base editing had occurred. FIGS. 66A through 66M depict the percent of A to G base editing at position 6 in the IDUA nucleic acid target site using three samples of each ABE8 base editor variants ABE8.1 through ABE8.13, respectively. FIG. 66N depicts the percent of A to G base editing at position 6 in the IDUA nucleic acid target site using three samples of positive control base editor ABE7.10. FIG. 66O depicts the percent of A to G base editing at position 6 in the IDUA nucleic acid target site using two samples of negative control.

[0304] FIG. 67 illustrates Rett/MECP2: Mutation correction. MECP2 loss of function—can result from many different de novo mutations. X-linked: XX patients are mosaic for MECP2 loss; XY usually results in infant mortality. FIG. 67 discloses SEQ ID NOS 473 and 306-308, respectively, in order of appearance.

[0305] FIG. 68 illustrates Rett Syndrome R106W mutation correction for top 3 guide sequences.

[0306] FIG. 69 illustrates Rett Syndrome R255X mutation correction with editors having NGTT PAM optimization.

[0307] FIGS. 70A-C: Hurler/IDUA mutation correction. FIG. 70A illustrates experiment design of IDUA W402X mutation correction. FIG. 70A discloses SEQ ID NO: 474. FIG. 70B illustrates the percent editing for each editor construct. FIG. 70C illustrates specific activity (nmol/mg/h) for edited and unedited constructs.

[0308] FIG. 71 depicts In vivo base editing with ABE 8.8. From left to right for each of each sample: Guide 11 (AAV9), Guide 12 (AAV9), Guide 11 (PHP.eB), Guide 12 (PHP.eB), and Control.

[0309] FIGS. 72A-72B. A•T to G•C conversion by ABE7.10 and ABE8 variants at the ABCA4 G1961E allele in a model cell line. FIG. 72A: A•T to G•C conversion in HEK293T cells at an integrated disease allele and wobble base of the ABCA4 G1961E codon after plasmid lipofection of the 21-nt spacer sgRNA and base editor variant. Cells incubated for 5 days after lipofection and were then assessed for editing. FIG. 72B: The DNA sequence at the site of interest including the ABCA4 G1961E disease allele, the wobble base of the codon, and the -NGG PAM used by the 21-nt spacer sgRNA. Error bars represent the s.d. of three replicates. In each data set, the disease allele is on the left and the wobble base is on the right. FIG. 72B discloses SEQ ID NOS 291 and 475, respectively, in order of appearance.

[0310] FIG. 73. A•T to G•C conversion by sgRNA spacer-length variants at the ABCA4 G1961E allele in a model cell line. A•T to G•C conversion in HEK293T cells at an integrated disease allele and wobble base of the ABCA4 G1961E codon after plasmid lipofection of the sgRNA of varied spacer lengths and ABE7.10. Cells incubated for 5 days after lipofection and were then assessed for editing. hRz=inclusion of a self-cleaving hammer head ribozyme at the 5′-end of the sgRNA. Error bars represent the s.d. of three replicates. In each data set, the disease allele is on the left and the wobble base is on the right.

[0311] FIG. 74. Schematic of the dual AAV delivery of a split base editor using split intein reconstitution. Two AAV particles are packaged separately with the components required for base editing. One virus encodes the C-terminal region of the base editor with an N-terminal split intein fusion, and a complementary virus encodes the N-terminal region of the base editor with a C-terminal split intein fusion as well as the sgRNA. Upon co-transduction of the complementary viruses, the sgRNA is transcribed and each half of the base editor is expressed and recombined through protein trans-splicing via the split intein.

[0312] FIGS. 75A-75B. A•T to G•C conversion by dual AAV delivery of split ABE variants at the ABCA4 G1961 in wild type cells. FIG. 75A: A•T to G•C and C•G to T•A conversion in wild type ARPE-19 cells at the wild type ABCA4 G1961 target site, in which editing at position 8A serves as a surrogate target for editing in these cells. Cells infected at a MOI of 5E+4 viral genomes per virus per cell. Cells were incubated for 2 weeks post infection and were then assessed for editing. Error bars represent the s.d. of six replicates. For each data point, samples treated with Pos. 8 (A>G)-surrogate site are shown on the left and Pos. 5 (C>T) are shown on the right.

[0313] FIG. 75B: The DNA sequence at the wild type target site including the ABCA4 G1961 allele and the -NGG PAM used by the 21-nt spacer sgRNA targeting the wild type sequence. FIG. 75B discloses SEQ ID NOS 292 and 476, respectively, in order of appearance.

[0314] FIGS. 76A-76B. Off target base editing in wild type ARPE-19 cells dual infected with AAV2 expressing split ABE7.10 and sgRNA targeting the disease allele of ABCA4 G1961E. FIG. 76A: Maximum A•T to G•C conversion across the target or off-target protospacers 2 weeks after co-infection with the dual AAV (teal) compared to untreated controls (gray). FIG. 76B: Maximum non-A•T to G•C conversion across the target or off-target protospacers 2 weeks after co-infection with the dual AAV (teal) compared to untreated controls (gray). For each data point, samples treated with wild type (wt) ARPE-19 cells are shown on the left and untreated wt ARPE-19 cells are shown on the right.

[0315] FIG. 77. Indel formation due to base editing in wild type ARPE-19 cells dual infected with AAV2 expressing split ABE7.10 and sgRNA targeting the disease allele of ABCA4 G1961E. Percentage of indels formed within or proximal to the target or off-target protospacers 2 weeks after co-infection with the dual AAV (teal) compared to untreated controls (gray). For each data point, samples treated with wild type (wt) ARPE-19 cells are shown on the left and untreated wt ARPE-19 cells are shown on the right.

[0316] FIG. 78: Primate Retina Integrity and GFP expression at Day 22 post-culture. Sections were immunolabeled with anti-Rhodopsin, anti-GFP, and biotinylated peanut agglutinin antibodies overnight at 4° C. Anc80L65.hGRK.eGFP showed GFP to be observed exclusively in the photoreceptor-containing outer nuclear layer (ONL) confirming photoreceptor-specific activity of the GRK promoter. Top row is Day 0, untransduced. The second row is Day 22, untransduced. Third row is Day 22, GRK. Fourth row is Day 22, CMB. Columns are unstained (1^{st} column), DAPI (2^{nd} column), GFP (3rd column), PNA (4th column), and rhodopsin (5th column).

[0317] FIG. 79: Cas9 Expression in NHP. Cas9 expression is detected in primate retina as early as day 6 post-culture. Results are shown for ABE7.10 (columns 1 and 2), ABE8.5 (columns 2 and 3), and ABE8.9 (columns 3 and 4). Top row: day 6 post-culture. Bottom row: day 17 post-culture. The results demonstrate that the AAV system delivers split-inteins that express Cas9. Scale Bar: 100 μm

### DETAILED DESCRIPTION OF THE INVENTION

[0318] The invention provides compositions comprising novel adenine base editors (e.g., ABE8) that have increased efficiency and methods of using them to generate modifications in target nucleobase sequences.

### Nucleobase Editor

[0319] Disclosed herein is a base editor or a nucleobase editor for editing, modifying or altering a target nucleotide sequence of a polynucleotide. Described herein is a nucleobase editor or a base editor comprising a polynucleotide programmable nucleotide binding domain (e.g., Cas9) and a nucleobase editing domain (e.g., adenosine deaminase). A polynucleotide programmable nucleotide binding domain (e.g., Cas9), when in conjunction with a bound guide polynucleotide (e.g., gRNA), can specifically bind to a target polynucleotide sequence (i.e., via complementary base pairing between bases of the bound guide nucleic acid and bases of the target polynucleotide sequence) and thereby localize the base editor to the target nucleic acid sequence desired to be edited. In some embodiments, the target polynucleotide sequence comprises single-stranded DNA or double-stranded DNA. In some embodiments, the target polynucleotide sequence comprises RNA. In some embodiments, the target polynucleotide sequence comprises a DNA-RNA hybrid.

### Polynucleotide Programmable Nucleotide Binding Domain

[0320] It should be appreciated that polynucleotide programmable nucleotide binding domains can also include nucleic acid programmable proteins that bind RNA. For example, the polynucleotide programmable nucleotide binding domain can be associated with a nucleic acid that guides the polynucleotide programmable nucleotide binding domain to an RNA. Other nucleic acid programmable DNA binding proteins are also within the scope of this disclosure, though they are not specifically listed in this disclosure.

[0321] A polynucleotide programmable nucleotide binding domain of a base editor can itself comprise one or more domains. For example, a polynucleotide programmable nucleotide binding domain can comprise one or more nuclease domains. In some embodiments, the nuclease domain of a polynucleotide programmable nucleotide binding domain can comprise an endonuclease or an exonuclease. Herein the term “exonuclease” refers to a protein or polypeptide capable of digesting a nucleic acid (e.g., RNA or DNA) from free ends, and the term “endonuclease” refers to a protein or polypeptide capable of catalyzing (e.g., cleaving) internal regions in a nucleic acid (e.g., DNA or RNA). In some embodiments, an endonuclease can cleave a single strand of a double-stranded nucleic acid. In some embodiments, an endonuclease can cleave both strands of a double-stranded nucleic acid molecule. In some embodiments a polynucleotide programmable nucleotide binding domain can be a deoxyribonuclease. In some embodiments a polynucleotide programmable nucleotide binding domain can be a ribonuclease.

[0322] In some embodiments, a nuclease domain of a polynucleotide programmable nucleotide binding domain can cut zero, one, or two strands of a target polynucleotide. In some embodiments, the polynucleotide programmable nucleotide binding domain can comprise a nickase domain. Herein the term “nickase” refers to a polynucleotide programmable nucleotide binding domain comprising a nuclease domain that is capable of cleaving only one strand of the two strands in a duplexed nucleic acid molecule (e.g., DNA). In some embodiments, a nickase can be derived from a fully catalytically active (e.g., natural) form of a polynucleotide programmable nucleotide binding domain by introducing one or more mutations into the active polynucleotide programmable nucleotide binding domain. For example, where a polynucleotide programmable nucleotide binding domain comprises a nickase domain derived from Cas9, the Cas9-derived nickase domain can include a D10A mutation and a histidine at position 840. In such embodiments, the residue H840 retains catalytic activity and can thereby cleave a single strand of the nucleic acid duplex. In another example, a Cas9-derived nickase domain can comprise an H840A mutation, while the amino acid residue at position 10 remains a D. In some embodiments, a nickase can be derived from a fully catalytically active (e.g., natural) form of a polynucleotide programmable nucleotide binding domain by removing all or a portion of a nuclease domain that is not required for the nickase activity. For example, where a polynucleotide programmable nucleotide binding domain comprises a nickase domain derived from Cas9, the Cas9-derived nickase domain can comprise a deletion of all or a portion of the RuvC domain or the HNH domain.

[0323] The amino acid sequence of an exemplary catalytically active Cas9 is as follows:

(SEQ ID NO: 1)
[sequence omitted]

[0324] A base editor comprising a polynucleotide programmable nucleotide binding domain comprising a nickase domain is thus able to generate a single-strand DNA break (nick) at a specific polynucleotide target sequence (e.g., determined by the complementary sequence of a bound guide nucleic acid). In some embodiments, the strand of a nucleic acid duplex target polynucleotide sequence that is cleaved by a base editor comprising a nickase domain (e.g., Cas9-derived nickase domain) is the strand that is not edited by the base editor (i.e., the strand that is cleaved by the base editor is opposite to a strand comprising a base to be edited). In other embodiments, a base editor comprising a nickase domain (e.g., Cas9-derived nickase domain) can cleave the strand of a DNA molecule which is being targeted for editing. In such embodiments, the non-targeted strand is not cleaved.

[0325] Also provided herein are base editors comprising a polynucleotide programmable nucleotide binding domain which is catalytically dead (i.e., incapable of cleaving a target polynucleotide sequence). Herein the terms “catalytically dead” and “nuclease dead” are used interchangeably to refer to a polynucleotide programmable nucleotide binding domain which has one or more mutations and/or deletions resulting in its inability to cleave a strand of a nucleic acid. In some embodiments, a catalytically dead polynucleotide programmable nucleotide binding domain base editor can lack nuclease activity as a result of specific point mutations in one or more nuclease domains. For example, in the case of a base editor comprising a Cas9 domain, the Cas9 can comprise both a D10A mutation and an H840A mutation. Such mutations inactivate both nuclease domains, thereby resulting in the loss of nuclease activity. In other embodiments, a catalytically dead polynucleotide programmable nucleotide binding domain can comprise one or more deletions of all or a portion of a catalytic domain (e.g., RuvC1 and/or HNH domains). In further embodiments, a catalytically dead polynucleotide programmable nucleotide binding domain comprises a point mutation (e.g., D10A or H840A) as well as a deletion of all or a portion of a nuclease domain.

[0326] Also contemplated herein are mutations capable of generating a catalytically dead polynucleotide programmable nucleotide binding domain from a previously functional version of the polynucleotide programmable nucleotide binding domain. For example, in the case of catalytically dead Cas9 (“dCas9”), variants having mutations other than D10A and H840A are provided, which result in nuclease inactivated Cas9. Such mutations, by way of example, include other amino acid substitutions at D10 and H840, or other substitutions within the nuclease domains of Cas9 (e.g., substitutions in the HNH nuclease subdomain and/or the RuvC1 subdomain). Additional suitable nuclease-inactive dCas9 domains can be apparent to those of skill in the art based on this disclosure and knowledge in the field, and are within the scope of this disclosure. Such additional exemplary suitable nuclease-inactive Cas9 domains include, but are not limited to, D10A/H840A, D10A/D839A/H840A, and D10A/D839A/H840A/N863A mutant domains (See, e.g., Prashant et al., CAS9 transcriptional activators for target specificity screening and paired nickases for cooperative genome engineering. Nature Biotechnology. 2013; 31(9): 833-838, the entire contents of which are incorporated herein by reference).

[0327] Non-limiting examples of a polynucleotide programmable nucleotide binding domain which can be incorporated into a base editor include a CRISPR protein-derived domain, a restriction nuclease, a meganuclease, TAL nuclease (TALEN), and a zinc finger nuclease (ZFN). In some embodiments, a base editor comprises a polynucleotide programmable nucleotide binding domain comprising a natural or modified protein or portion thereof which via a bound guide nucleic acid is capable of binding to a nucleic acid sequence during CRISPR (i.e., Clustered Regularly Interspaced Short Palindromic Repeats)-mediated modification of a nucleic acid. Such a protein is referred to herein as a “CRISPR protein.” Accordingly, disclosed herein is a base editor comprising a polynucleotide programmable nucleotide binding domain comprising all or a portion of a CRISPR protein (i.e. a base editor comprising as a domain all or a portion of a CRISPR protein, also referred to as a “CRISPR protein-derived domain” of the base editor). A CRISPR protein-derived domain incorporated into a base editor can be modified compared to a wild-type or natural version of the CRISPR protein. For example, as described below a CRISPR protein-derived domain can comprise one or more mutations, insertions, deletions, rearrangements and/or recombinations relative to a wild-type or natural version of the CRISPR protein.

[0328] CRISPR is an adaptive immune system that provides protection against mobile genetic elements (viruses, transposable elements and conjugative plasmids). CRISPR clusters contain spacers, sequences complementary to antecedent mobile elements, and target invading nucleic acids. CRISPR clusters are transcribed and processed into CRISPR RNA (crRNA). In type II CRISPR systems, correct processing of pre-crRNA requires a trans-encoded small RNA (tracrRNA), endogenous ribonuclease 3 (mc) and a Cas9 protein. The tracrRNA serves as a guide for ribonuclease 3-aided processing of pre-crRNA. Subsequently, Cas9/crRNA/tracrRNA endonucleolytically cleaves linear or circular dsDNA target complementary to the spacer. The target strand not complementary to crRNA is first cut endonucleolytically, and then trimmed 3′-5′ exonucleolytically. In nature, DNA-binding and cleavage typically requires protein and both RNAs. However, single guide RNAs (“sgRNA,” or simply “gNRA”) can be engineered so as to incorporate aspects of both the crRNA and tracrRNA into a single RNA species. See, e.g., Jinek M., et al., Science 337:816-821(2012), the entire contents of which is hereby incorporated by reference. Cas9 recognizes a short motif in the CRISPR repeat sequences (the PAM or protospacer adjacent motif) to help distinguish self versus non-self.

[0329] In some embodiments, the methods described herein can utilize an engineered Cas protein. A guide RNA (gRNA) is a short synthetic RNA composed of a scaffold sequence necessary for Cas-binding and a user-defined ˜20 nucleotide spacer that defines the genomic target to be modified. Thus, a skilled artisan can change the genomic target of the Cas protein specificity is partially determined by how specific the gRNA targeting sequence is for the genomic target compared to the rest of the genome.

[0330] In some embodiments, the gRNA scaffold sequence is as follows: GUUUUAGAGC UAGAAAUAGC AAGUUAAAAU AAGGCUAGUC CGUUAUCAAC UUGAAAAAGU GGCACCGAGU CGGUGCUUUU (SEQ ID NO: 101).

[0331] In some embodiments, a CRISPR protein-derived domain incorporated into a base editor is an endonuclease (e.g., deoxyribonuclease or ribonuclease) capable of binding a target polynucleotide when in conjunction with a bound guide nucleic acid. In some embodiments, a CRISPR protein-derived domain incorporated into a base editor is a nickase capable of binding a target polynucleotide when in conjunction with a bound guide nucleic acid. In some embodiments, a CRISPR protein-derived domain incorporated into a base editor is a catalytically dead domain capable of binding a target polynucleotide when in conjunction with a bound guide nucleic acid. In some embodiments, a target polynucleotide bound by a CRISPR protein derived domain of a base editor is DNA. In some embodiments, a target polynucleotide bound by a CRISPR protein-derived domain of a base editor is RNA.

[0332] Cas proteins that can be used herein include class 1 and class 2. Non-limiting examples of Cas proteins include Cas1, Cas1B, Cas2, Cas3, Cas4, Cas5, Cas5d, Cas5t, Cas5 h, Cas5a, Cas6, Cas7, Cas8, Cas9 (also known as Csn1 or Csx12), Cas10, Csy1, Csy2, Csy3, Csy4, Cse1, Cse2, Cse3, Cse4, Cse5e, Csc1, Csc2, Csa5, Csn1, Csn2, Csm1, Csm2, Csm3, Csm4, Csm5, Csm6, Cmr1, Cmr3, Cmr4, Cmr5, Cmr6, Csb1, Csb2, Csb3, Csx17, Csx14, Csx10, Csx16, CsaX, Csx3, Csx1, Csx1S, Csf1, Csf2, CsO, Csf4, Csd1, Csd2, Cst1, Cst2, Csh1, Csh2, Csa1, Csa2, Csa3, Csa4, Csa5, Cas12a/Cpf1, Cas12b/C2c1, Cas12c/C2c3, Cas12d/CasY, Cas12e/CasX, Cas12g, Cas12 h, and Cas12i, CARF, DinG, homologues thereof, or modified versions thereof. An unmodified CRISPR enzyme can have DNA cleavage activity, such as Cas9, which has two functional endonuclease domains: RuvC and HNH. A CRISPR enzyme can direct cleavage of one or both strands at a target sequence, such as within a target sequence and/or within a complement of a target sequence. For example, a CRISPR enzyme can direct cleavage of one or both strands within about 1, 2, 3, 4, 5, 6, 7, 8, 9, 10, 15, 20, 25, 50, 100, 200, 500, or more base pairs from the first or last nucleotide of a target sequence.

[0333] A vector that encodes a CRISPR enzyme that is mutated to with respect, to a corresponding wild-type enzyme such that the mutated CRISPR enzyme lacks the ability to cleave one or both strands of a target polynucleotide containing a target sequence can be used. Cas9 can refer to a polypeptide with at least or at least about 50%, 60%, 70%, 80%, 90%, 91%, 92%, 93%, 94%, 95%, 96%, 97%, 98%, 99%, or 100% sequence identity and/or sequence homology to a wild-type exemplary Cas9 polypeptide (e.g., Cas9 from S. pyogenes). Cas9 can refer to a polypeptide with at most or at most about 50%, 60%, 70%, 80%, 90%, 91%, 92%, 93%, 94%, 95%, 96%, 97%, 98%, 99%, or 100% sequence identity and/or sequence homology to a wild-type exemplary Cas9 polypeptide (e.g., from S. pyogenes). Cas9 can refer to the wild-type or a modified form of the Cas9 protein that can comprise an amino acid change such as a deletion, insertion, substitution, variant, mutation, fusion, chimera, or any combination thereof.

[0334] In some embodiments, a CRISPR protein-derived domain of a base editor can include all or a portion of Cas9 from Corynebacterium ulcerans (NCBI Refs: NC_015683.1, NC_017317.1); Corynebacterium diphtheria (NCBI Refs: NC_016782.1, NC_016786.1); Spiroplasma syrphidicola (NCBI Ref: NC_021284.1); Prevotella intermedia (NCBI Ref: NC_017861.1); Spiroplasma taiwanense (NCBI Ref: NC_021846.1); Streptococcus iniae (NCBI Ref: NC_021314.1); Belliella baltica (NCBI Ref: NC_018010.1); Psychroflexus torquis (NCBI Ref: NC_018721.1); Streptococcus thermophilus (NCBI Ref: YP_820832.1); Listeria innocua (NCBI Ref: NP_472073.1); Campylobacter jejuni (NCBI Ref: YP_002344900.1); Neisseria meningitidis (NCBI Ref: YP_002342100.1), Streptococcus pyogenes, or Staphylococcus aureus.

### Cas9 Domains of Nucleobase Editors

[0335] Cas9 nuclease sequences and structures are well known to those of skill in the art (See, e.g., “Complete genome sequence of an M1 strain of Streptococcus pyogenes.” Ferretti et al., Proc. Natl. Acad. Sci. U.S.A. 98:4658-4663(2001); “CRISPR RNA maturation by trans-encoded small RNA and host factor RNase III.” Deltcheva E., et al., Nature 471:602-607(2011); and “A programmable dual-RNA-guided DNA endonuclease in adaptive bacterial immunity.” Jinek M., et al., Science 337:816-821(2012), the entire contents of each of which are incorporated herein by reference). Cas9 orthologs have been described in various species, including, but not limited to, S. pyogenes and S. thermophilus. Additional suitable Cas9 nucleases and sequences will be apparent to those of skill in the art based on this disclosure, and such Cas9 nucleases and sequences include Cas9 sequences from the organisms and loci disclosed in Chylinski, Rhun, and Charpentier, “The tracrRNA and Cas9 families of type II CRISPR-Cas immunity systems” (2013) RNA Biology 10:5, 726-737; the entire contents of which are incorporated herein by reference.

[0336] In some embodiments, a nucleic acid programmable DNA binding protein (napDNAbp) is a Cas9 domain. Non-limiting, exemplary Cas9 domains are provided herein. The Cas9 domain may be a nuclease active Cas9 domain, a nuclease inactive Cas9 domain (dCas9), or a Cas9 nickase (nCas9). In some embodiments, the Cas9 domain is a nuclease active domain. For example, the Cas9 domain may be a Cas9 domain that cuts both strands of a duplexed nucleic acid (e.g., both strands of a duplexed DNA molecule). In some embodiments, the Cas9 domain comprises any one of the amino acid sequences as set forth herein. In some embodiments the Cas9 domain comprises an amino acid sequence that is at least 60%, at least 65%, at least 70%, at least 75%, at least 80%, at least 85%, at least 90%, at least 95%, at least 96%, at least 97%, at least 98%, at least 99%, or at least 99.5% identical to any one of the amino acid sequences set forth herein. In some embodiments, the Cas9 domain comprises an amino acid sequence that has 1, 2, 3, 4, 5, 6, 7, 8, 9, 10, 11, 12, 13, 14, 15, 16, 17, 18, 19, 20, 21, 22, 21, 24, 25, 26, 27, 28, 29, 30, 31, 32, 33, 34, 35, 36, 37, 38, 39, 40, 41, 42, 43, 44, 45, 46, 47, 48, 49, 50 or more or more mutations compared to any one of the amino acid sequences set forth herein. In some embodiments, the Cas9 domain comprises an amino acid sequence that has at least 10, at least 15, at least 20, at least 30, at least 40, at least 50, at least 60, at least 70, at least 80, at least 90, at least 100, at least 150, at least 200, at least 250, at least 300, at least 350, at least 400, at least 500, at least 600, at least 700, at least 800, at least 900, at least 1000, at least 1100, or at least 1200 identical contiguous amino acid residues as compared to any one of the amino acid sequences set forth herein.

[0337] In some embodiments, proteins comprising fragments of Cas9 are provided. For example, in some embodiments, a protein comprises one of two Cas9 domains: (1) the gRNA binding domain of Cas9; or (2) the DNA cleavage domain of Cas9. In some embodiments, proteins comprising Cas9 or fragments thereof are referred to as “Cas9 variants.” A Cas9 variant shares homology to Cas9, or a fragment thereof. For example, a Cas9 variant is at least about 70% identical, at least about 80% identical, at least about 90% identical, at least about 95% identical, at least about 96% identical, at least about 97% identical, at least about 98% identical, at least about 99% identical, at least about 99.5% identical, or at least about 99.9% identical to wild-type Cas9. In some embodiments, the Cas9 variant may have 1, 2, 3, 4, 5, 6, 7, 8, 9, 10, 11, 12, 13, 14, 15, 16, 17, 18, 19, 20, 21, 22, 21, 24, 25, 26, 27, 28, 29, 30, 31, 32, 33, 34, 35, 36, 37, 38, 39, 40, 41, 42, 43, 44, 45, 46, 47, 48, 49, 50 or more amino acid changes compared to wild-type Cas9. In some embodiments, the Cas9 variant comprises a fragment of Cas9 (e.g., a gRNA binding domain or a DNA-cleavage domain), such that the fragment is at least about 70% identical, at least about 80% identical, at least about 90% identical, at least about 95% identical, at least about 96% identical, at least about 97% identical, at least about 98% identical, at least about 99% identical, at least about 99.5% identical, or at least about 99.9% identical to the corresponding fragment of wild-type Cas9. In some embodiments, the fragment is at least 30%, at least 35%, at least 40%, at least 45%, at least 50%, at least 55%, at least 60%, at least 65%, at least 70%, at least 75%, at least 80%, at least 85%, at least 90%, at least 95% identical, at least 96%, at least 97%, at least 98%, at least 99%, or at least 99.5% of the amino acid length of a corresponding wild-type Cas9. In some embodiments, the fragment is at least 100 amino acids in length. In some embodiments, the fragment is at least 100, 150, 200, 250, 300, 350, 400, 450, 500, 550, 600, 650, 700, 750, 800, 850, 900, 950, 1000, 1050, 1100, 1150, 1200, 1250, or at least 1300 amino acids in length.

[0338] In some embodiments, Cas9 fusion proteins as provided herein comprise the full-length amino acid sequence of a Cas9 protein, e.g., one of the Cas9 sequences provided herein. In other embodiments, however, fusion proteins as provided herein do not comprise a full-length Cas9 sequence, but only one or more fragments thereof. Exemplary amino acid sequences of suitable Cas9 domains and Cas9 fragments are provided herein, and additional suitable sequences of Cas9 domains and fragments will be apparent to those of skill in the art.

[0339] A Cas9 protein can associate with a guide RNA that guides the Cas9 protein to a specific DNA sequence that has complementary to the guide RNA. In some embodiments, the polynucleotide programmable nucleotide binding domain is a Cas9 domain, for example a nuclease active Cas9, a Cas9 nickase (nCas9), or a nuclease inactive Cas9 (dCas9). Examples of nucleic acid programmable DNA binding proteins include, without limitation, Cas9 (e.g., dCas9 and nCas9), CasX, CasY, Cpf1, Cas12b/C2C1, and Cas12c/C2C3. In some embodiments, wild-type Cas9 corresponds to Cas9 from Streptococcus pyogenes (NCBI Reference Sequence: NC_017053.1, nucleotide and amino acid sequences as follows).

(SEQ ID NO: 43)
ATGGATAAGAAATACTCAATAGGCTTAGATATCGGCACAAATAGCGTCGGATGGGCGGTGAT
CACTGATGATTATAAGGTTCCGTCTAAAAAGTTCAAGGTTCTGGGAAATACAGACCGCCACA
GTATCAAAAAAAATCTTATAGGGGCTCTTTTATTTGGCAGTGGAGAGACAGCGGAAGCGACT
CGTCTCAAACGGACAGCTCGTAGAAGGTATACACGTCGGAAGAATCGTATTTGTTATCTACA
GGAGATTTTTTCAAATGAGATGGCGAAAGTAGATGATAGTTTCTTTCATCGACTTGAAGAGT
CTTTTTTGGTGGAAGAAGACAAGAAGCATGAACGTCATCCTATTTTTGGAAATATAGTAGAT
GAAGTTGCTTATCATGAGAAATATCCAACTATCTATCATCTGCGAAAAAAATTGGCAGATTC
TACTGATAAAGCGGATTTGCGCTTAATCTATTTGGCCTTAGCGCATATGATTAAGTTTCGTG
GTCATTTTTTGATTGAGGGAGATTTAAATCCTGATAATAGTGATGTGGACAAACTATTTATC
CAGTTGGTACAAATCTACAATCAATTATTTGAAGAAAACCCTATTAACGCAAGTAGAGTAGA
TGCTAAAGCGATTCTTTCTGCACGATTGAGTAAATCAAGACGATTAGAAAATCTCATTGCTC
AGCTCCCCGGTGAGAAGAGAAATGGCTTGTTTGGGAATCTCATTGCTTTGTCATTGGGATTG
ACCCCTAATTTTAAATCAAATTTTGATTTGGCAGAAGATGCTAAATTACAGCTTTCAAAAGA
TACTTACGATGATGATTTAGATAATTTATTGGCGCAAATTGGAGATCAATATGCTGATTTGT
TTTTGGCAGCTAAGAATTTATCAGATGCTATTTTACTTTCAGATATCCTAAGAGTAAATAGT
GAAATAACTAAGGCTCCCCTATCAGCTTCAATGATTAAGCGCTACGATGAACATCATCAAGA
CTTGACTCTTTTAAAAGCTTTAGTTCGACAACAACTTCCAGAAAAGTATAAAGAAATCTTTT
TTGATCAATCAAAAAACGGATATGCAGGTTATATTGATGGGGGAGCTAGCCAAGAAGAATTT
TATAAATTTATCAAACCAATTTTAGAAAAAATGGATGGTACTGAGGAATTATTGGTGAAACT
AAATCGTGAAGATTTGCTGCGCAAGCAACGGACCTTTGACAACGGCTCTATTCCCCATCAAA
TTCACTTGGGTGAGCTGCATGCTATTTTGAGAAGACAAGAAGACTTTTATCCATTTTTAAAA
GACAATCGTGAGAAGATTGAAAAAATCTTGACTTTTCGAATTCCTTATTATGTTGGTCCATT
GGCGCGTGGCAATAGTCGTTTTGCATGGATGACTCGGAAGTCTGAAGAAACAATTACCCCAT
GGAATTTTGAAGAAGTTGTCGATAAAGGTGCTTCAGCTCAATCATTTATTGAACGCATGACA
AACTTTGATAAAAATCTTCCAAATGAAAAAGTACTACCAAAACATAGTTTGCTTTATGAGTA
TTTTACGGTTTATAACGAATTGACAAAGGTCAAATATGTTACTGAGGGAATGCGAAAACCAG
CATTTCTTTCAGGTGAACAGAAGAAAGCCATTGTTGATTTACTCTTCAAAACAAATCGAAAA
GTAACCGTTAAGCAATTAAAAGAAGATTATTTCAAAAAAATAGAATGTTTTGATAGTGTTGA
AATTTCAGGAGTTGAAGATAGATTTAATGCTTCATTAGGCGCCTACCATGATTTGCTAAAAA
TTATTAAAGATAAAGATTTTTTGGATAATGAAGAAAATGAAGATATCTTAGAGGATATTGTT
TTAACATTGACCTTATTTGAAGATAGGGGGATGATTGAGGAAAGACTTAAAACATATGCTCA
CCTCTTTGATGATAAGGTGATGAAACAGCTTAAACGTCGCCGTTATACTGGTTGGGGACGTT
TGTCTCGAAAATTGATTAATGGTATTAGGGATAAGCAATCTGGCAAAACAATATTAGATTTT
TTGAAATCAGATGGTTTTGCCAATCGCAATTTTATGCAGCTGATCCATGATGATAGTTTGAC
ATTTAAAGAAGATATTCAAAAAGCACAGGTGTCTGGACAAGGCCATAGTTTACATGAACAGA
TTGCTAACTTAGCTGGCAGTCCTGCTATTAAAAAAGGTATTTTACAGACTGTAAAAATTGTT
GATGAACTGGTCAAAGTAATGGGGCATAAGCCAGAAAATATCGTTATTGAAATGGCACGTGA
AAATCAGACAACTCAAAAGGGCCAGAAAAATTCGCGAGAGCGTATGAAACGAATCGAAGAAG
GTATCAAAGAATTAGGAAGTCAGATTCTTAAAGAGCATCCTGTTGAAAATACTCAATTGCAA
AATGAAAAGCTCTATCTCTATTATCTACAAAATGGAAGAGACATGTATGTGGACCAAGAATT
AGATATTAATCGTTTAAGTGATTATGATGTCGATCACATTGTTCCACAAAGTTTCATTAAAG
ACGATTCAATAGACAATAAGGTACTAACGCGTTCTGATAAAAATCGTGGTAAATCGGATAAC
GTTCCAAGTGAAGAAGTAGTCAAAAAGATGAAAAACTATTGGAGACAACTTCTAAACGCCAA
GTTAATCACTCAACGTAAGTTTGATAATTTAACGAAAGCTGAACGTGGAGGTTTGAGTGAAC
TTGATAAAGCTGGTTTTATCAAACGCCAATTGGTTGAAACTCGCCAAATCACTAAGCATGTG
GCACAAATTTTGGATAGTCGCATGAATACTAAATACGATGAAAATGATAAACTTATTCGAGA
GGTTAAAGTGATTACCTTAAAATCTAAATTAGTTTCTGACTTCCGAAAAGATTTCCAATTCT
ATAAAGTACGTGAGATTAACAATTACCATCATGCCCATGATGCGTATCTAAATGCCGTCGTT
GGAACTGCTTTGATTAAGAAATATCCAAAACTTGAATCGGAGTTTGTCTATGGTGATTATAA
AGTTTATGATGTTCGTAAAATGATTGCTAAGTCTGAGCAAGAAATAGGCAAAGCAACCGCAA
AATATTTCTTTTACTCTAATATCATGAACTTCTTCAAAACAGAAATTACACTTGCAAATGGA
GAGATTCGCAAACGCCCTCTAATCGAAACTAATGGGGAAACTGGAGAAATTGTCTGGGATAA
AGGGCGAGATTTTGCCACAGTGCGCAAAGTATTGTCCATGCCCCAAGTCAATATTGTCAAGA
AAACAGAAGTACAGACAGGCGGATTCTCCAAGGAGTCAATTTTACCAAAAAGAAATTCGGAC
AAGCTTATTGCTCGTAAAAAAGACTGGGATCCAAAAAAATATGGTGGTTTTGATAGTCCAAC
GGTAGCTTATTCAGTCCTAGTGGTTGCTAAGGTGGAAAAAGGGAAATCGAAGAAGTTAAAAT
CCGTTAAAGAGTTACTAGGGATCACAATTATGGAAAGAAGTTCCTTTGAAAAAAATCCGATT
GACTTTTTAGAAGCTAAAGGATATAAGGAAGTTAAAAAAGACTTAATCATTAAACTACCTAA
ATATAGTCTTTTTGAGTTAGAAAACGGTCGTAAACGGATGCTGGCTAGTGCCGGAGAATTAC
AAAAAGGAAATGAGCTGGCTCTGCCAAGCAAATATGTGAATTTTTTATATTTAGCTAGTCAT
TATGAAAAGTTGAAGGGTAGTCCAGAAGATAACGAACAAAAACAATTGTTTGTGGAGCAGCA
TAAGCATTATTTAGATGAGATTATTGAGCAAATCAGTGAATTTTCTAAGCGTGTTATTTTAG
CAGATGCCAATTTAGATAAAGTTCTTAGTGCATATAACAAACATAGAGACAAACCAATACGT
GAACAAGCAGAAAATATTATTCATTTATTTACGTTGACGAATCTTGGAGCTCCCGCTGCTTT
TAAATATTTTGATACAACAATTGATCGTAAACGATATACGTCTACAAAAGAAGTTTTAGATG
CCACTCTTATCCATCAATCCATCACTGGTCTTTATGAAACACGCATTGATTTGAGTCAGCTA
GGAGGTGACTGA
(SEQ ID NO: 42)
MDKKYSIGLDIGTNSVGWAVITDDYKVPSKKFKVLGNTDRHSIKKNLIGALLFGSGETAEAT
RLKRTARRRYTRRKNRICYLQEIFSNEMAKVDDSFFHRLEESFLVEEDKKHERHPIFGNIVD
EVAYHEKYPTIYHLRKKLADSTDKADLRLIYLALAHMIKFRGHFLIEGDLNPDNSDVDKLFI
QLVQIYNQLFEENPINASRVDAKAILSARLSKSRRLENLIAQLPGEKRNGLFGNLIALSLGL
TPNFKSNFDLAEDAKLQLSKDTYDDDLDNLLAQIGDQYADLFLAAKNLSDAILLSDILRVNS
EITKAPLSASMIKRYDEHHQDLTLLKALVRQQLPEKYKEIFFDQSKNGYAGYIDGGASQEEF
YKFIKPILEKMDGTEELLVKLNREDLLRKQRTFDNGSIPHQIHLGELHAILRRQEDFYPFLK
DNREKIEKILTFRIPYYVGPLARGNSRFAWMTRKSEETITPWNFEEVVDKGASAQSFIERMT
NFDKNLPNEKVLPKHSLLYEYFTVYNELTKVKYVTEGMRKPAFLSGEQKKAIVDLLFKTNRK
VTVKQLKEDYFKKIECFDSVEISGVEDRFNASLGAYHDLLKIIKDKDFLDNEENEDILEDIV
LTLTLFEDRGMIEERLKTYAHLFDDKVMKQLKRRRYTGWGRLSRKLINGIRDKQSGKTILDF
LKSDGFANRNFMQLIHDDSLTFKEDIQKAQVSGQGHSLHEQIANLAGSPAIKKGILQTVKIV
DELVKVMGHKPENIVIEMARENQTTQKGQKNSRERMKRIEEGIKELGSQILKEHPVENTQLQ
NEKLYLYYLQNGRDMYVDQELDINRLSDYDVDHIVPQSFIKDDSIDNKVLTRSDKNRGKSDN
VPSEEVVKKMKNYWRQLLNAKLITQRKFDNLTKAERGGLSELDKAGFIKRQLVETRQITKHV
AQILDSRMNTKYDENDKLIREVKVITLKSKLVSDFRKDFQFYKVREINNYHHAHDAYLNAVV
GTALIKKYPKLESEFVYGDYKVYDVRKMIAKSEQEIGKATAKYFFYSNIMNFFKTEITLANG
EIRKRPLIETNGETGEIVWDKGRDFATVRKVLSMPQVNIVKKTEVQTGGFSKESILPKRNSD
KLIARKKDWDPKKYGGFDSPTVAYSVLVVAKVEKGKSKKLKSVKELLGITIMERSSFEKNPI
DFLEAKGYKEVKKDLIIKLPKYSLFELENGRKRMLASAGELQKGNELALPSKYVNFLYLASH
YEKLKGSPEDNEQKQLFVEQHKHYLDEIIEQISEFSKRVILADANLDKVLSAYNKHRDKPIR
EQAENIIHLFTLTNLGAPAAFKYFDTTIDRKRYTSTKEVLDATLIHQSITGLYETRIDLSQL
GGD
(single underline: HNH domain; double underline: RuvC domain)

[0340] In some embodiments, wild-type Cas9 corresponds to, or comprises the following nucleotide and/or amino acid sequences:

(SEQ ID NO: 44)
ATGGATAAAAAGTATTCTATTGGTTTAGACATCGGCACTAATTCCGTTGGATGGGCTGTCAT
AACCGATGAATACAAAGTACCTTCAAAGAAATTTAAGGTGTTGGGGAACACAGACCGTCATT
CGATTAAAAAGAATCTTATCGGTGCCCTCCTATTCGATAGTGGCGAAACGGCAGAGGCGACT
CGCCTGAAACGAACCGCTCGGAGAAGGTATACACGTCGCAAGAACCGAATATGTTACTTACA
AGAAATTTTTAGCAATGAGATGGCCAAAGTTGACGATTCTTTCTTTCACCGTTTGGAAGAGT
CCTTCCTTGTCGAAGAGGACAAGAAACATGAACGGCACCCCATCTTTGGAAACATAGTAGAT
GAGGTGGCATATCATGAAAAGTACCCAACGATTTATCACCTCAGAAAAAAGCTAGTTGACTC
AACTGATAAAGCGGACCTGAGGTTAATCTACTTGGCTCTTGCCCATATGATAAAGTTCCGTG
GGCACTTTCTCATTGAGGGTGATCTAAATCCGGACAACTCGGATGTCGACAAACTGTTCATC
CAGTTAGTACAAACCTATAATCAGTTGTTTGAAGAGAACCCTATAAATGCAAGTGGCGTGGA
TGCGAAGGCTATTCTTAGCGCCCGCCTCTCTAAATCCCGACGGCTAGAAAACCTGATCGCAC
AATTACCCGGAGAGAAGAAAAATGGGTTGTTCGGTAACCTTATAGCGCTCTCACTAGGCCTG
ACACCAAATTTTAAGTCGAACTTCGACTTAGCTGAAGATGCCAAATTGCAGCTTAGTAAGGA
CACGTACGATGACGATCTCGACAATCTACTGGCACAAATTGGAGATCAGTATGCGGACTTAT
TTTTGGCTGCCAAAAACCTTAGCGATGCAATCCTCCTATCTGACATACTGAGAGTTAATACT
GAGATTACCAAGGCGCCGTTATCCGCTTCAATGATCAAAAGGTACGATGAACATCACCAAGA
CTTGACACTTCTCAAGGCCCTAGTCCGTCAGCAACTGCCTGAGAAATATAAGGAAATATTCT
TTGATCAGTCGAAAAACGGGTACGCAGGTTATATTGACGGCGGAGCGAGTCAAGAGGAATTC
TACAAGTTTATCAAACCCATATTAGAGAAGATGGATGGGACGGAAGAGTTGCTTGTAAAACT
CAATCGCGAAGATCTACTGCGAAAGCAGCGGACTTTCGACAACGGTAGCATTCCACATCAAA
TCCACTTAGGCGAATTGCATGCTATACTTAGAAGGCAGGAGGATTTTTATCCGTTCCTCAAA
GACAATCGTGAAAAGATTGAGAAAATCCTAACCTTTCGCATACCTTACTATGTGGGACCCCT
GGCCCGAGGGAACTCTCGGTTCGCATGGATGACAAGAAAGTCCGAAGAAACGATTACTCCAT
GGAATTTTGAGGAAGTTGTCGATAAAGGTGCGTCAGCTCAATCGTTCATCGAGAGGATGACC
AACTTTGACAAGAATTTACCGAACGAAAAAGTATTGCCTAAGCACAGTTTACTTTACGAGTA
TTTCACAGTGTACAATGAACTCACGAAAGTTAAGTATGTCACTGAGGGCATGCGTAAACCCG
CCTTTCTAAGCGGAGAACAGAAGAAAGCAATAGTAGATCTGTTATTCAAGACCAACCGCAAA
GTGACAGTTAAGCAATTGAAAGAGGACTACTTTAAGAAAATTGAATGCTTCGATTCTGTCGA
GATCTCCGGGGTAGAAGATCGATTTAATGCGTCACTTGGTACGTATCATGACCTCCTAAAGA
TAATTAAAGATAAGGACTTCCTGGATAACGAAGAGAATGAAGATATCTTAGAAGATATAGTG
TTGACTCTTACCCTCTTTGAAGATCGGGAAATGATTGAGGAAAGACTAAAAACATACGCTCA
CCTGTTCGACGATAAGGTTATGAAACAGTTAAAGAGGCGTCGCTATACGGGCTGGGGACGAT
TGTCGCGGAAACTTATCAACGGGATAAGAGACAAGCAAAGTGGTAAAACTATTCTCGATTTT
CTAAAGAGCGACGGCTTCGCCAATAGGAACTTTATGCAGCTGATCCATGATGACTCTTTAAC
CTTCAAAGAGGATATACAAAAGGCACAGGTTTCCGGACAAGGGGACTCATTGCACGAACATA
TTGCGAATCTTGCTGGTTCGCCAGCCATCAAAAAGGGCATACTCCAGACAGTCAAAGTAGTG
GATGAGCTAGTTAAGGTCATGGGACGTCACAAACCGGAAAACATTGTAATCGAGATGGCACG
CGAAAATCAAACGACTCAGAAGGGGCAAAAAAACAGTCGAGAGCGGATGAAGAGAATAGAAG
AGGGTATTAAAGAACTGGGCAGCCAGATCTTAAAGGAGCATCCTGTGGAAAATACCCAATTG
CAGAACGAGAAACTTTACCTCTATTACCTACAAAATGGAAGGGACATGTATGTTGATCAGGA
ACTGGACATAAACCGTTTATCTGATTACGACGTCGATCACATTGTACCCCAATCCTTTTTGA
AGGACGATTCAATCGACAATAAAGTGCTTACACGCTCGGATAAGAACCGAGGGAAAAGTGAC
AATGTTCCAAGCGAGGAAGTCGTAAAGAAAATGAAGAACTATTGGCGGCAGCTCCTAAATGC
GAAACTGATAACGCAAAGAAAGTTCGATAACTTAACTAAAGCTGAGAGGGGTGGCTTGTCTG
AACTTGACAAGGCCGGATTTATTAAACGTCAGCTCGTGGAAACCCGCCAAATCACAAAGCAT
GTTGCACAGATACTAGATTCCCGAATGAATACGAAATACGACGAGAACGATAAGCTGATTCG
GGAAGTCAAAGTAATCACTTTAAAGTCAAAATTGGTGTCGGACTTCAGAAAGGATTTTCAAT
TCTATAAAGTTAGGGAGATAAATAACTACCACCATGCGCACGACGCTTATCTTAATGCCGTC
GTAGGGACCGCACTCATTAAGAAATACCCGAAGCTAGAAAGTGAGTTTGTGTATGGTGATTA
CAAAGTTTATGACGTCCGTAAGATGATCGCGAAAAGCGAACAGGAGATAGGCAAGGCTACAG
CCAAATACTTCTTTTATTCTAACATTATGAATTTCTTTAAGACGGAAATCACTCTGGCAAAC
GGAGAGATACGCAAACGACCTTTAATTGAAACCAATGGGGAGACAGGTGAAATCGTATGGGA
TAAGGGCCGGGACTTCGCGACGGTGAGAAAAGTTTTGTCCATGCCCCAAGTCAACATAGTAA
AGAAAACTGAGGTGCAGACCGGAGGGTTTTCAAAGGAATCGATTCTTCCAAAAAGGAATAGT
GATAAGCTCATCGCTCGTAAAAAGGACTGGGACCCGAAAAAGTACGGTGGCTTCGATAGCCC
TACAGTTGCCTATTCTGTCCTAGTAGTGGCAAAAGTTGAGAAGGGAAAATCCAAGAAACTGA
AGTCAGTCAAAGAATTATTGGGGATAACGATTATGGAGCGCTCGTCTTTTGAAAAGAACCCC
ATCGACTTCCTTGAGGCGAAAGGTTACAAGGAAGTAAAAAAGGATCTCATAATTAAACTACC
AAAGTATAGTCTGTTTGAGTTAGAAAATGGCCGAAAACGGATGTTGGCTAGCGCCGGAGAGC
TTCAAAAGGGGAACGAACTCGCACTACCGTCTAAATACGTGAATTTCCTGTATTTAGCGTCC
CATTACGAGAAGTTGAAAGGTTCACCTGAAGATAACGAACAGAAGCAACTTTTTGTTGAGCA
GCACAAACATTATCTCGACGAAATCATAGAGCAAATTTCGGAATTCAGTAAGAGAGTCATCC
TAGCTGATGCCAATCTGGACAAAGTATTAAGCGCATACAACAAGCACAGGGATAAACCCATA
CGTGAGCAGGCGGAAAATATTATCCATTTGTTTACTCTTACCAACCTCGGCGCTCCAGCCGC
ATTCAAGTATTTTGACACAACGATAGATCGCAAACGATACACTTCTACCAAGGAGGTGCTAG
ACGCGACACTGATTCACCAATCCATCACGGGATTATATGAAACTCGGATAGATTTGTCACAG
CTTGGGGGTGACGGATCCCCCAAGAAGAAGAGGAAAGTCTCGAGCGACTACAAAGACCATGA
CGGTGATTATAAAGATCATGACATCGATTACAAGGATGACGATGACAAGGCTGCAGGA
(SEQ ID NO: 102)
MDKKYSIGLAIGTNSVGWAVITDEYKVPSKKFKVLGNTDRHSIKKNLIGALLFDSGETAEAT
RLKRTARRRYTRRKNRICYLQEIFSNEMAKVDDSFFHRLEESFLVEEDKKHERHPIFGNIVD
EVAYHEKYPTIYHLRKKLVDSTDKADLRLIYLALAHMIKFRGHFLIEGDLNPDNSDVDKLFI
QLVQTYNQLFEENPINASGVDAKAILSARLSKSRRLENLIAQLPGEKKNGLFGNLIALSLGL
TPNFKSNFDLAEDAKLQLSKDTYDDDLDNLLAQIGDQYADLFLAAKNLSDAILLSDILRVNT
EITKAPLSASMIKRYDEHHQDLTLLKALVRQQLPEKYKEIFFDQSKNGYAGYIDGGASQEEF
YKFIKPILEKMDGTEELLVKLNREDLLRKQRTFDNGSIPHQIHLGELHAILRRQEDFYPFLK
DNREKIEKILTFRIPYYVGPLARGNSRFAWMTRKSEETITPWNFEEVVDKGASAQSFIERMT
NFDKNLPNEKVLPKHSLLYEYFTVYNELTKVKYVTEGMRKPAFLSGEQKKAIVDLLFKTNRK
VTVKQLKEDYFKKIECFDSVEISGVEDRFNASLGTYHDLLKIIKDKDFLDNEENEDILEDIV
LTLTLFEDREMIEERLKTYAHLFDDKVMKQLKRRRYTGWGRLSRKLINGIRDKQSGKTILDF
LKSDGFANRNFMQLIHDDSLTFKEDIQKAQVSGQGDSLHEHIANLAGSPAIKKGILQTVKVV
DELVKVMGRHKPENIVIEMARENQTTQKGQKNSRERMKRIEEGIKELGSQILKEHPVENTQL
QNEKLYLYYLQNGRDMYVDQELDINRLSDYDVDHIVPQSFLKDDSIDNKVLTRSDKNRGKSD
NVPSEEVVKKMKNYWRQLLNAKLITQRKFDNLTKAERGGLSELDKAGFIKRQLVETRQITKH
VAQILDSRMNTKYDENDKLIREVKVITLKSKLVSDFRKDFQFYKVREINNYHHAHDAYLNAV
VGTALIKKYPKLESEFVYGDYKVYDVRKMIAKSEQEIGKATAKYFFYSNIMNFFKTEITLAN
GEIRKRPLIETNGETGEIVWDKGRDFATVRKVLSMPQVNIVKKTEVQTGGFSKESILPKRNS
DKLIARKKDWDPKKYGGFDSPTVAYSVLVVAKVEKGKSKKLKSVKELLGITIMERSSFEKNP
IDFLEAKGYKEVKKDLIIKLPKYSLFELENGRKRMLASAGELQKGNELALPSKYVNFLYLAS
HYEKLKGSPEDNEQKQLFVEQHKHYLDEIIEQISEFSKRVILADANLDKVLSAYNKHRDKPI
REQAENIIHLFTLTNLGAPAAFKYFDTTIDRKRYTSTKEVLDATLIHQSITGLYETRIDLSQ
LGGD
(single underline: HNH domain; double underline: RuvC domain).

[0341] In some embodiments, wild-type Cas9 corresponds to Cas9 from Streptococcus pyogenes (NCBI Reference Sequence: NC_002737.2 (nucleotide sequence as follows); and Uniprot Reference Sequence: Q99ZW2 (amino acid sequence as follows):

(SEQ ID NO: 45)
ATGGATAAGAAATACTCAATAGGCTTAGATATCGGCACAAATAGCGTCGGATGGGCGGTGAT
CACTGATGAATATAAGGTTCCGTCTAAAAAGTTCAAGGTTCTGGGAAATACAGACCGCCACA
GTATCAAAAAAAATCTTATAGGGGCTCTTTTATTTGACAGTGGAGAGACAGCGGAAGCGACT
CGTCTCAAACGGACAGCTCGTAGAAGGTATACACGTCGGAAGAATCGTATTTGTTATCTACA
GGAGATTTTTTCAAATGAGATGGCGAAAGTAGATGATAGTTTCTTTCATCGACTTGAAGAGT
CTTTTTTGGTGGAAGAAGACAAGAAGCATGAACGTCATCCTATTTTTGGAAATATAGTAGAT
GAAGTTGCTTATCATGAGAAATATCCAACTATCTATCATCTGCGAAAAAAATTGGTAGATTC
TACTGATAAAGCGGATTTGCGCTTAATCTATTTGGCCTTAGCGCATATGATTAAGTTTCGTG
GTCATTTTTTGATTGAGGGAGATTTAAATCCTGATAATAGTGATGTGGACAAACTATTTATC
CAGTTGGTACAAACCTACAATCAATTATTTGAAGAAAACCCTATTAACGCAAGTGGAGTAGA
TGCTAAAGCGATTCTTTCTGCACGATTGAGTAAATCAAGACGATTAGAAAATCTCATTGCTC
AGCTCCCCGGTGAGAAGAAAAATGGCTTATTTGGGAATCTCATTGCTTTGTCATTGGGTTTG
ACCCCTAATTTTAAATCAAATTTTGATTTGGCAGAAGATGCTAAATTACAGCTTTCAAAAGA
TACTTACGATGATGATTTAGATAATTTATTGGCGCAAATTGGAGATCAATATGCTGATTTGT
TTTTGGCAGCTAAGAATTTATCAGATGCTATTTTACTTTCAGATATCCTAAGAGTAAATACT
GAAATAACTAAGGCTCCCCTATCAGCTTCAATGATTAAACGCTACGATGAACATCATCAAGA
CTTGACTCTTTTAAAAGCTTTAGTTCGACAACAACTTCCAGAAAAGTATAAAGAAATCTTTT
TTGATCAATCAAAAAACGGATATGCAGGTTATATTGATGGGGGAGCTAGCCAAGAAGAATTT
TATAAATTTATCAAACCAATTTTAGAAAAAATGGATGGTACTGAGGAATTATTGGTGAAACT
AAATCGTGAAGATTTGCTGCGCAAGCAACGGACCTTTGACAACGGCTCTATTCCCCATCAAA
TTCACTTGGGTGAGCTGCATGCTATTTTGAGAAGACAAGAAGACTTTTATCCATTTTTAAAA
GACAATCGTGAGAAGATTGAAAAAATCTTGACTTTTCGAATTCCTTATTATGTTGGTCCATT
GGCGCGTGGCAATAGTCGTTTTGCATGGATGACTCGGAAGTCTGAAGAAACAATTACCCCAT
GGAATTTTGAAGAAGTTGTCGATAAAGGTGCTTCAGCTCAATCATTTATTGAACGCATGACA
AACTTTGATAAAAATCTTCCAAATGAAAAAGTACTACCAAAACATAGTTTGCTTTATGAGTA
TTTTACGGTTTATAACGAATTGACAAAGGTCAAATATGTTACTGAAGGAATGCGAAAACCAG
CATTTCTTTCAGGTGAACAGAAGAAAGCCATTGTTGATTTACTCTTCAAAACAAATCGAAAA
GTAACCGTTAAGCAATTAAAAGAAGATTATTTCAAAAAAATAGAATGTTTTGATAGTGTTGA
AATTTCAGGAGTTGAAGATAGATTTAATGCTTCATTAGGTACCTACCATGATTTGCTAAAAA
TTATTAAAGATAAAGATTTTTTGGATAATGAAGAAAATGAAGATATCTTAGAGGATATTGTT
TTAACATTGACCTTATTTGAAGATAGGGAGATGATTGAGGAAAGACTTAAAACATATGCTCA
CCTCTTTGATGATAAGGTGATGAAACAGCTTAAACGTCGCCGTTATACTGGTTGGGGACGTT
TGTCTCGAAAATTGATTAATGGTATTAGGGATAAGCAATCTGGCAAAACAATATTAGATTTT
TTGAAATCAGATGGTTTTGCCAATCGCAATTTTATGCAGCTGATCCATGATGATAGTTTGAC
ATTTAAAGAAGACATTCAAAAAGCACAAGTGTCTGGACAAGGCGATAGTTTACATGAACATA
TTGCAAATTTAGCTGGTAGCCCTGCTATTAAAAAAGGTATTTTACAGACTGTAAAAGTTGTT
GATGAATTGGTCAAAGTAATGGGGCGGCATAAGCCAGAAAATATCGTTATTGAAATGGCACG
TGAAAATCAGACAACTCAAAAGGGCCAGAAAAATTCGCGAGAGCGTATGAAACGAATCGAAG
AAGGTATCAAAGAATTAGGAAGTCAGATTCTTAAAGAGCATCCTGTTGAAAATACTCAATTG
CAAAATGAAAAGCTCTATCTCTATTATCTCCAAAATGGAAGAGACATGTATGTGGACCAAGA
ATTAGATATTAATCGTTTAAGTGATTATGATGTCGATCACATTGTTCCACAAAGTTTCCTTA
AAGACGATTCAATAGACAATAAGGTCTTAACGCGTTCTGATAAAAATCGTGGTAAATCGGAT
AACGTTCCAAGTGAAGAAGTAGTCAAAAAGATGAAAAACTATTGGAGACAACTTCTAAACGC
CAAGTTAATCACTCAACGTAAGTTTGATAATTTAACGAAAGCTGAACGTGGAGGTTTGAGTG
AACTTGATAAAGCTGGTTTTATCAAACGCCAATTGGTTGAAACTCGCCAAATCACTAAGCAT
GTGGCACAAATTTTGGATAGTCGCATGAATACTAAATACGATGAAAATGATAAACTTATTCG
AGAGGTTAAAGTGATTACCTTAAAATCTAAATTAGTTTCTGACTTCCGAAAAGATTTCCAAT
TCTATAAAGTACGTGAGATTAACAATTACCATCATGCCCATGATGCGTATCTAAATGCCGTC
GTTGGAACTGCTTTGATTAAGAAATATCCAAAACTTGAATCGGAGTTTGTCTATGGTGATTA
TAAAGTTTATGATGTTCGTAAAATGATTGCTAAGTCTGAGCAAGAAATAGGCAAAGCAACCG
CAAAATATTTCTTTTACTCTAATATCATGAACTTCTTCAAAACAGAAATTACACTTGCAAAT
GGAGAGATTCGCAAACGCCCTCTAATCGAAACTAATGGGGAAACTGGAGAAATTGTCTGGGA
TAAAGGGCGAGATTTTGCCACAGTGCGCAAAGTATTGTCCATGCCCCAAGTCAATATTGTCA
AGAAAACAGAAGTACAGACAGGCGGATTCTCCAAGGAGTCAATTTTACCAAAAAGAAATTCG
GACAAGCTTATTGCTCGTAAAAAAGACTGGGATCCAAAAAAATATGGTGGTTTTGATAGTCC
AACGGTAGCTTATTCAGTCCTAGTGGTTGCTAAGGTGGAAAAAGGGAAATCGAAGAAGTTAA
AATCCGTTAAAGAGTTACTAGGGATCACAATTATGGAAAGAAGTTCCTTTGAAAAAAATCCG
ATTGACTTTTTAGAAGCTAAAGGATATAAGGAAGTTAAAAAAGACTTAATCATTAAACTACC
TAAATATAGTCTTTTTGAGTTAGAAAACGGTCGTAAACGGATGCTGGCTAGTGCCGGAGAAT
TACAAAAAGGAAATGAGCTGGCTCTGCCAAGCAAATATGTGAATTTTTTATATTTAGCTAGT
CATTATGAAAAGTTGAAGGGTAGTCCAGAAGATAACGAACAAAAACAATTGTTTGTGGAGCA
GCATAAGCATTATTTAGATGAGATTATTGAGCAAATCAGTGAATTTTCTAAGCGTGTTATTT
TAGCAGATGCCAATTTAGATAAAGTTCTTAGTGCATATAACAAACATAGAGACAAACCAATA
CGTGAACAAGCAGAAAATATTATTCATTTATTTACGTTGACGAATCTTGGAGCTCCCGCTGC
TTTTAAATATTTTGATACAACAATTGATCGTAAACGATATACGTCTACAAAAGAAGTTTTAG
ATGCCACTCTTATCCATCAATCCATCACTGGTCTTTATGAAACACGCATTGATTTGAGTCAG
CTAGGAGGTGACTGA
(SEQ ID NO: 1)
MDKKYSIGLDIGTNSVGWAVITDEYKVPSKKFKVLGNTDRHSIKKNLIGALLFDSGETAEAT
RLKRTARRRYTRRKNRICYLQEIFSNEMAKVDDSFFHRLEESFLVEEDKKHERHPIFGNIVD
EVAYHEKYPTIYHLRKKLVDSTDKADLRLIYLALAHMIKFRGHFLIEGDLNPDNSDVDKLFI
QLVQTYNQLFEENPINASGVDAKAILSARLSKSRRLENLIAQLPGEKKNGLFGNLIALSLGL
TPNFKSNFDLAEDAKLQLSKDTYDDDLDNLLAQIGDQYADLFLAAKNLSDAILLSDILRVNT
EITKAPLSASMIKRYDEHHQDLTLLKALVRQQLPEKYKEIFFDQSKNGYAGYIDGGASQEEF
YKFIKPILEKMDGTEELLVKLNREDLLRKQRTFDNGSIPHQIHLGELHAILRRQEDFYPFLK
DNREKIEKILTFRIPYYVGPLARGNSRFAWMTRKSEETITPWNFEEVVDKGASAQSFIERMT
NFDKNLPNEKVLPKHSLLYEYFTVYNELTKVKYVTEGMRKPAFLSGEQKKAIVDLLFKTNRK
VTVKQLKEDYFKKIECFDSVEISGVEDRFNASLGTYHDLLKIIKDKDFLDNEENEDILEDIV
LTLTLFEDREMIEERLKTYAHLFDDKVMKQLKRRRYTGWGRLSRKLINGIRDKQSGKTILDF
LKSDGFANRNFMQLIHDDSLTFKEDIQKAQVSGQGDSLHEHIANLAGSPAIKKGILQTVKVV
DELVKVMGRHKPENIVIEMARENQTTQKGQKNSRERMKRIEEGIKELGSQILKEHPVENTQL
QNEKLYLYYLQNGRDMYVDQELDINRLSDYDVDHIVPQSFLKDDSIDNKVLTRSDKNRGKSD
NVPSEEVVKKMKNYWRQLLNAKLITQRKFDNLTKAERGGLSELDKAGFIKRQLVETRQITKH
VAQILDSRMNTKYDENDKLIREVKVITLKSKLVSDFRKDFQFYKVREINNYHHAHDAYLNAV
VGTALIKKYPKLESEFVYGDYKVYDVRKMIAKSEQEIGKATAKYFFYSNIMNFFKTEITLAN
GEIRKRPLIETNGETGEIVWDKGRDFATVRKVLSMPQVNIVKKTEVQTGGFSKESILPKRNS
DKLIARKKDWDPKKYGGFDSPTVAYSVLVVAKVEKGKSKKLKSVKELLGITIMERSSFEKNP
IDFLEAKGYKEVKKDLIIKLPKYSLFELENGRKRMLASAGELQKGNELALPSKYVNFLYLAS
HYEKLKGSPEDNEQKQLFVEQHKHYLDEIIEQISEFSKRVILADANLDKVLSAYNKHRDKPI
REQAENIIHLFTLTNLGAPAAFKYFDTTIDRKRYTSTKEVLDATLIHQSITGLYETRIDLSQ
LGGD
(single underline: HNH domain; double underline: RuvC domain)

[0342] In some embodiments, Cas9 refers to Cas9 from: Corynebacterium ulcerans (NCBI Refs: NC_015683.1, NC_017317.1); Corynebacterium diphtheria (NCBI Refs: NC_016782.1, NC_016786.1); Spiroplasma syrphidicola (NCBI Ref: NC_021284.1); Prevotella intermedia (NCBI Ref: NC_017861.1); Spiroplasma taiwanense (NCBI Ref: NC_021846.1); Streptococcus iniae (NCBI Ref: NC_021314.1); Belliella baltica (NCBI Ref: NC_018010.1); Psychroflexus torquis I (NCBI Ref: NC_018721.1); Streptococcus thermophilus (NCBI Ref: YP_820832.1), Listeria innocua (NCBI Ref: NP_472073.1), Campylobacter jejuni (NCBI Ref: YP_002344900.1) or Neisseria meningitidis (NCBI Ref: YP_002342100.1) or to a Cas9 from any other organism.

[0343] It should be appreciated that additional Cas9 proteins (e.g., a nuclease dead Cas9 (dCas9), a Cas9 nickase (nCas9), or a nuclease active Cas9), including variants and homologs thereof, are within the scope of this disclosure. Exemplary Cas9 proteins include, without limitation, those provided below. In some embodiments, the Cas9 protein is a nuclease dead Cas9 (dCas9). In some embodiments, the Cas9 protein is a Cas9 nickase (nCas9). In some embodiments, the Cas9 protein is a nuclease active Cas9.

[0344] In some embodiments, the Cas9 domain is a nuclease-inactive Cas9 domain (dCas9). For example, the dCas9 domain may bind to a duplexed nucleic acid molecule (e.g., via a gRNA molecule) without cleaving either strand of the duplexed nucleic acid molecule. In some embodiments, the nuclease-inactive dCas9 domain comprises a D10X mutation and a H840X mutation of the amino acid sequence set forth herein, or a corresponding mutation in any of the amino acid sequences provided herein, wherein X is any amino acid change. In some embodiments, the nuclease-inactive dCas9 domain comprises a D10A mutation and a H840A mutation of the amino acid sequence set forth herein, or a corresponding mutation in any of the amino acid sequences provided herein. As one example, a nuclease-inactive Cas9 domain comprises the amino acid sequence set forth in Cloning vector pPlatTET-gRNA2 (Accession No. BAV54124).

[0345] The amino acid sequence of an exemplary catalytically inactive Cas9 (dCas9) is as follows:

(SEQ ID NO: 46)
MDKKYSIGLAIGTNSVGWAVITDEYKVPSKKFKVLGNTDRHSIKKNLIGAL
LFDSGETAEATRLKRTARRRYTRRKNRICYLQEIFSNEMAKVDDSFFHRLE
ESFLVEEDKKHERHPIFGNIVDEVAYHEKYPTIYHLRKKLVDSTDKADLRL
IYLALAHMIKFRGHFLIEGDLNPDNSDVDKLFIQLVQTYNQLFEENPINAS
GVDAKAILSARLSKSRRLENLIAQLPGEKKNGLFGNLIALSLGLTPNFKSN
FDLAEDAKLQLSKDTYDDDLDNLLAQIGDQYADLFLAAKNLSDAILLSDIL
RVNTEITKAPLSASMIKRYDEHHQDLTLLKALVRQQLPEKYKEIFFDQSKN
GYAGYIDGGASQEEFYKFIKPILEKMDGTEELLVKLNREDLLRKQRTFDNG
SIPHQIHLGELHAILRRQEDFYPFLKDNREKIEKILTFRIPYYVGPLARGN
SRFAWMTRKSEETITPWNFEEVVDKGASAQSFIERMTNFDKNLPNEKVLPK
HSLLYEYFTVYNELTKVKYVTEGMRKPAFLSGEQKKAIVDLLFKTNRKVTV
KQLKEDYFKKIECFDSVEISGVEDRFNASLGTYHDLLKIIKDKDFLDNEEN
EDILEDIVLTLTLFEDREMIEERLKTYAHLFDDKVMKQLKRRRYTGWGRLS
RKLINGIRDKQSGKTILDFLKSDGFANRNFMQLIHDDSLTFKEDIQKAQVS
GQGDSLHEHIANLAGSPAIKKGILQTVKVVDELVKVMGRHKPENIVIEMAR
ENQTTQKGQKNSRERMKRIEEGIKELGSQILKEHPVENTQLQNEKLYLYYL
QNGRDMYVDQELDINRLSDYDVDAIVPQSFLKDDSIDNKVLTRSDKNRGKS
DNVPSEEVVKKMKNYWRQLLNAKLITQRKFDNLTKAERGGLSELDKAGFIK
RQLVETRQITKHVAQILDSRMNTKYDENDKLIREVKVITLKSKLVSDFRKD
FQFYKVREINNYHHAHDAYLNAVVGTALIKKYPKLESEFVYGDYKVYDVRK
MIAKSEQEIGKATAKYFFYSNIMNFFKTEITLANGEIRKRPLIETNGETGE
IVWDKGRDFATVRKVLSMPQVNIVKKTEVQTGGFSKESILPKRNSDKLIAR
KKDWDPKKYGGFDSPTVAYSVLVVAKVEKGKSKKLKSVKELLGITIMERSS
FEKNPIDFLEAKGYKEVKKDLIIKLPKYSLFELENGRKRMLASAGELQKGN
ELALPSKYVNFLYLASHYEKLKGSPEDNEQKQLFVEQHKHYLDEIIEQISE
FSKRVILADANLDKVLSAYNKHRDKPIREQAENIIHLFTLTNLGAPAAFKY
FDTTIDRKRYTSTKEVLDATLIHQSITGLYETRIDLSQLGGD

(see, e.g., Qi et al., “Repurposing CRISPR as an RNA-guided platform for sequence-specific control of gene expression.” Cell. 2013; 152(5): 1173-83, the entire contents of which are incorporated herein by reference).

[0346] Additional suitable nuclease-inactive dCas9 domains will be apparent to those of skill in the art based on this disclosure and knowledge in the field, and are within the scope of this disclosure. Such additional exemplary suitable nuclease-inactive Cas9 domains include, but are not limited to, D10A/H840A, D10A/D839A/H840A, and D10A/D839A/H840A/N863A mutant domains (See, e.g., Prashant et al., CAS9 transcriptional activators for target specificity screening and paired nickases for cooperative genome engineering. Nature Biotechnology. 2013; 31(9): 833-838, the entire contents of which are incorporated herein by reference).

[0347] In some embodiments, a Cas9 nuclease has an inactive (e.g., an inactivated) DNA cleavage domain, that is, the Cas9 is a nickase, referred to as an “nCas9” protein (for “nickase” Cas9). A nuclease-inactivated Cas9 protein may interchangeably be referred to as a “dCas9” protein (for nuclease-“dead” Cas9) or catalytically inactive Cas9. Methods for generating a Cas9 protein (or a fragment thereof) having an inactive DNA cleavage domain are known (See, e.g., Jinek et al., Science. 337:816-821(2012); Qi et al., “Repurposing CRISPR as an RNA-Guided Platform for Sequence-Specific Control of Gene Expression” (2013) Cell. 28; 152(5):1173-83, the entire contents of each of which are incorporated herein by reference). For example, the DNA cleavage domain of Cas9 is known to include two subdomains, the HNH nuclease subdomain and the RuvC1 subdomain. The HNH subdomain cleaves the strand complementary to the gRNA, whereas the RuvC1 subdomain cleaves the non-complementary strand. Mutations within these subdomains can silence the nuclease activity of Cas9. For example, the mutations D10A and H840A completely inactivate the nuclease activity of S. pyogenes Cas9 (Jinek et al., Science. 337:816-821(2012); Qi et al., Cell. 28; 152(5):1173-83 (2013)).

[0348] In some embodiments, the dCas9 domain comprises an amino acid sequence that is at least 60%, at least 65%, at least 70%, at least 75%, at least 80%, at least 85%, at least 90%, at least 95%, at least 96%, at least 97%, at least 98%, at least 99%, or at least 99.5% identical to any one of the dCas9 domains provided herein. In some embodiments, the Cas9 domain comprises an amino acid sequences that has 1, 2, 3, 4, 5, 6, 7, 8, 9, 10, 11, 12, 13, 14, 15, 16, 17, 18, 19, 20, 21, 22, 21, 24, 25, 26, 27, 28, 29, 30, 31, 32, 33, 34, 35, 36, 37, 38, 39, 40, 41, 42, 43, 44, 45, 46, 47, 48, 49, 50 or more or more mutations compared to any one of the amino acid sequences set forth herein. In some embodiments, the Cas9 domain comprises an amino acid sequence that has at least 10, at least 15, at least 20, at least 30, at least 40, at least 50, at least 60, at least 70, at least 80, at least 90, at least 100, at least 150, at least 200, at least 250, at least 300, at least 350, at least 400, at least 500, at least 600, at least 700, at least 800, at least 900, at least 1000, at least 1100, or at least 1200 identical contiguous amino acid residues as compared to any one of the amino acid sequences set forth herein.

[0349] In some embodiments, dCas9 corresponds to, or comprises in part or in whole, a Cas9 amino acid sequence having one or more mutations that inactivate the Cas9 nuclease activity. For example, in some embodiments, a dCas9 domain comprises D10A and an H840A mutation or corresponding mutations in another Cas9.

[0350] In some embodiments, the dCas9 comprises the amino acid sequence of dCas9 (D10A and H840A):

(SEQ ID NO: 46)
MDKKYSIGLAIGTNSVGWAVITDEYKVPSKKFKVLGNTDRHSIKKNLIGAL
LFDSGETAEATRLKRTARRRYTRRKNRICYLQEIFSNEMAKVDDSFFHRLE
ESFLVEEDKKHERHPIFGNIVDEVAYHEKYPTIYHLRKKLVDSTDKADLRL
IYLALAHMIKFRGHFLIEGDLNPDNSDVDKLFIQLVQTYNQLFEENPINAS
GVDAKAILSARLSKSRRLENLIAQLPGEKKNGLFGNLIALSLGLTPNFKSN
FDLAEDAKLQLSKDTYDDDLDNLLAQIGDQYADLFLAAKNLSDAILLSDIL
RVNTEITKAPLSASMIKRYDEHHQDLTLLKALVRQQLPEKYKEIFFDQSKN
GYAGYIDGGASQEEFYKFIKPILEKMDGTEELLVKLNREDLLRKQRTFDNG
SIPHQIHLGELHAILRRQEDFYPFLKDNREKIEKILTFRIPYYVGPLARGN
SRFAWMTRKSEETITPWNFEEVVDKGASAQSFIERMTNFDKNLPNEKVLPK
HSLLYEYFTVYNELTKVKYVTEGMRKPAFLSGEQKKAIVDLLFKTNRKVTV
KQLKEDYFKKIECFDSVEISGVEDRFNASLGTYHDLLKIIKDKDFLDNEEN
EDILEDIVLTLTLFEDREMIEERLKTYAHLFDDKVMKQLKRRRYTGWGRLS
RKLINGIRDKQSGKTILDFLKSDGFANRNFMQLIHDDSLTFKEDIQKAQVS
GQGDSLHEHIANLAGSPAIKKGILQTVKVVDELVKVMGRHKPENIVIEMAR
ENQTTQKGQKNSRERMKRIEEGIKELGSQILKEHPVENTQLQNEKLYLYYL
QNGRDMYVDQELDINRLSDYDVDAIVPQSFLKDDSIDNKVLTRSDKNRGKS
DNVPSEEVVKKMKNYWRQLLNAKLITQRKFDNLTKAERGGLSELDKAGFIK
RQLVETRQITKHVAQILDSRMNTKYDENDKLIREVKVITLKSKLVSDFRKD
FQFYKVREINNYHHAHDAYLNAVVGTALIKKYPKLESEFVYGDYKVYDVRK
MIAKSEQEIGKATAKYFFYSNIMNFFKTEITLANGEIRKRPLIETNGETGE
IVWDKGRDFATVRKVLSMPQVNIVKKTEVQTGGFSKESILPKRNSDKLIAR
KKDWDPKKYGGFDSPTVAYSVLVVAKVEKGKSKKLKSVKELLGITIMERSS
FEKNPIDFLEAKGYKEVKKDLIIKLPKYSLFELENGRKRMLASAGELQKGN
ELALPSKYVNFLYLASHYEKLKGSPEDNEQKQLFVEQHKHYLDEIIEQISE
FSKRVILADANLDKVLSAYNKHRDKPIREQAENIIHLFTLTNLGAPAAFKY
FDTTIDRKRYTSTKEVLDATLIHQSITGLYETRIDLSQLGGD
(single underline: HNH domain; double underline:
RuvC domain).

[0351] In some embodiments, the Cas9 domain comprises a D10A mutation, while the residue at position 840 remains a histidine in the amino acid sequence provided above, or at corresponding positions in any of the amino acid sequences provided herein.

[0352] In other embodiments, dCas9 variants having mutations other than D10A and H840A are provided, which, e.g., result in nuclease inactivated Cas9 (dCas9). Such mutations, by way of example, include other amino acid substitutions at D10 and H840, or other substitutions within the nuclease domains of Cas9 (e.g., substitutions in the HNH nuclease subdomain and/or the RuvC1 subdomain). In some embodiments, variants or homologues of dCas9 are provided which are at least about 70% identical, at least about 80% identical, at least about 90% identical, at least about 95% identical, at least about 98% identical, at least about 99% identical, at least about 99.5% identical, or at least about 99.9% identical. In some embodiments, variants of dCas9 are provided having amino acid sequences which are shorter, or longer, by about 5 amino acids, by about 10 amino acids, by about 15 amino acids, by about 20 amino acids, by about 25 amino acids, by about 30 amino acids, by about 40 amino acids, by about 50 amino acids, by about 75 amino acids, by about 100 amino acids or more.

[0353] In some embodiments, the Cas9 domain is a Cas9 nickase. The Cas9 nickase may be a Cas9 protein that is capable of cleaving only one strand of a duplexed nucleic acid molecule (e.g., a duplexed DNA molecule). In some embodiments the Cas9 nickase cleaves the target strand of a duplexed nucleic acid molecule, meaning that the Cas9 nickase cleaves the strand that is base paired to (complementary to) a gRNA (e.g., an sgRNA) that is bound to the Cas9. In some embodiments, a Cas9 nickase comprises a D10A mutation and has a histidine at position 840. In some embodiments the Cas9 nickase cleaves the non-target, non-base-edited strand of a duplexed nucleic acid molecule, meaning that the Cas9 nickase cleaves the strand that is not base paired to a gRNA (e.g., an sgRNA) that is bound to the Cas9. In some embodiments, a Cas9 nickase comprises an H840A mutation and has an aspartic acid residue at position 10, or a corresponding mutation. In some embodiments the Cas9 nickase comprises an amino acid sequence that is at least 60%, at least 65%, at least 70%, at least 75%, at least 80%, at least 85%, at least 90%, at least 95%, at least 96%, at least 97%, at least 98%, at least 99%, or at least 99.5% identical to any one of the Cas9 nickases provided herein. Additional suitable Cas9 nickases will be apparent to those of skill in the art based on this disclosure and knowledge in the field, and are within the scope of this disclosure. The amino acid sequence of an exemplary catalytically Cas9 nickase (nCas9) is as follows:

(SEQ ID NO: 103)
MDKKYSIGLAIGTNSVGWAVITDEYKVPSKKFKVLGNTDRHSIKKNLIGAL
LFDSGETAEATRLKRTARRRYTRRKNRICYLQEIFSNEMAKVDDSFFHRLE
ESFLVEEDKKHERHPIFGNIVDEVAYHEKYPTIYHLRKKLVDSTDKADLRL
IYLALAHMIKFRGHFLIEGDLNPDNSDVDKLFIQLVQTYNQLFEENPINAS
GVDAKAILSARLSKSRRLENLIAQLPGEKKNGLFGNLIALSLGLTPNFKSN
FDLAEDAKLQLSKDTYDDDLDNLLAQIGDQYADLFLAAKNLSDAILLSDIL
RVNTEITKAPLSASMIKRYDEHHQDLTLLKALVRQQLPEKYKEIFFDQSKN
GYAGYIDGGASQEEFYKFIKPILEKMDGTEELLVKLNREDLLRKQRTFDNG
SIPHQIHLGELHAILRRQEDFYPFLKDNREKIEKILTFRIPYYVGPLARGN
SRFAWMTRKSEETITPWNFEEVVDKGASAQSFIERMTNFDKNLPNEKVLPK
HSLLYEYFTVYNELTKVKYVTEGMRKPAFLSGEQKKAIVDLLFKTNRKVTV
KQLKEDYFKKIECFDSVEISGVEDRFNASLGTYHDLLKIIKDKDFLDNEEN
EDILEDIVLTLTLFEDREMIEERLKTYAHLFDDKVMKQLKRRRYTGWGRLS
RKLINGIRDKQSGKTILDFLKSDGFANRNFMQLIHDDSLTFKEDIQKAQVS
GQGDSLHEHIANLAGSPAIKKGILQTVKVVDELVKVMGRHKPENIVIEMAR
ENQTTQKGQKNSRERMKRIEEGIKELGSQILKEHPVENTQLQNEKLYLYYL
QNGRDMYVDQELDINRLSDYDVDHIVPQSFLKDDSIDNKVLTRSDKNRGKS
DNVPSEEVVKKMKNYWRQLLNAKLITQRKFDNLTKAERGGLSELDKAGFIK
RQLVETRQITKHVAQILDSRMNTKYDENDKLIREVKVITLKSKLVSDFRKD
FQFYKVREINNYHHAHDAYLNAVVGTALIKKYPKLESEFVYGDYKVYDVRK
MIAKSEQEIGKATAKYFFYSNIMNFFKTEITLANGEIRKRPLIETNGETGE
IVWDKGRDFATVRKVLSMPQVNIVKKTEVQTGGFSKESILPKRNSDKLIAR
KKDWDPKKYGGFDSPTVAYSVLVVAKVEKGKSKKLKSVKELLGITIMERSS
FEKNPIDFLEAKGYKEVKKDLIIKLPKYSLFELENGRKRMLASAGELQKGN
ELALPSKYVNFLYLASHYEKLKGSPEDNEQKQLFVEQHKHYLDEIIEQISE
FSKRVILADANLDKVLSAYNKHRDKPIREQAENIIHLFTLTNLGAPAAFKY
FDTTIDRKRYTSTKEVLDATLIHQSITGLYETRIDLSQLGGD

[0354] In some embodiments, Cas9 refers to a Cas9 from archaea (e.g., nanoarchaea), which constitute a domain and kingdom of single-celled prokaryotic microbes. In some embodiments, the programmable nucleotide binding protein may be a CasX or CasY protein, which have been described in, for example, Burstein et al., “New CRISPR-Cas systems from uncultivated microbes.” Cell Res. 2017 Feb. 21. doi: 10.1038/cr.2017.21, the entire contents of which is hereby incorporated by reference. Using genome-resolved metagenomics, a number of CRISPR-Cas systems were identified, including the first reported Cas9 in the archaeal domain of life. This divergent Cas9 protein was found in little-studied nanoarchaea as part of an active CRISPR-Cas system. In bacteria, two previously unknown systems were discovered, CRISPR-CasX and CRISPR-CasY, which are among the most compact systems yet discovered. In some embodiments, in a base editor system described herein Cas9 is replaced by CasX, or a variant of CasX. In some embodiments, in a base editor system described herein Cas9 is replaced by CasY, or a variant of CasY. It should be appreciated that other RNA-guided DNA binding proteins may be used as a nucleic acid programmable DNA binding protein (napDNAbp), and are within the scope of this disclosure.

[0355] In some embodiments, the nucleic acid programmable DNA binding protein (napDNAbp) of any of the fusion proteins provided herein may be a CasX or CasY protein. In some embodiments, the napDNAbp is a CasX protein. In some embodiments, the napDNAbp is a CasY protein. In some embodiments, the napDNAbp comprises an amino acid sequence that is at least 85%, at least 90%, at least 91%, at least 92%, at least 93%, at least 94%, at least 95%, at least 96%, at least 97%, at least 98%, at least 99%, or at ease 99.5% identical to a naturally-occurring CasX or CasY protein. In some embodiments, the programmable nucleotide binding protein is a naturally-occurring CasX or CasY protein. In some embodiments, the programmable nucleotide binding protein comprises an amino acid sequence that is at least 85%, at least 90%, at least 91%, at least 92%, at least 93%, at least 94%, at least 95%, at least 96%, at least 97%, at least 98%, at least 99%, or at ease 99.5% identical to any CasX or CasY protein described herein. It should be appreciated that CasX and CasY from other bacterial species may also be used in accordance with the present disclosure.

[0356] In some embodiments, the Cas9 is a Neisseria menigitidis Cas9 (NmeCas9) or a variant thereof. NmeCas9 features and PAM sequences as described in Edraki et al. Mol. Cell. (2019) 73(4): 714-726 is incorporated herein by reference in its entirety.

[0357] An exemplary amino acid sequence of a Nme1Cas9 is provided below:

| type II CRISPR RNA-guided endonuclease Cas9 [Neisseria meningitidis] | |
|---|---|
| WP_002235162.1 | |
| (SEQ ID NO: 104) | |
| 1 | maafkpnpin yilgldigia svgwamveid edenpiclid lgvrvferae vpktgdslam |
| 61 | arrlarsvrr ltrrrahrll rarrllkreg vlqaadfden glikslpntp wqlraaaldr |
| 121 | kltplewsav llhlikhrgy lsqrkneget adkelgallk gvadnahalq tgdfrtpael |
| 181 | alnkfekesg hirnqrgdys htfsrkdlqa elillfekqk efgnphvsgg lkegietllm |
| 241 | tqrpalsgda vqkmlghctf epaepkaakn tytaerfiwl tklnnlrile qgserpltdt |
| 301 | eratlmdepy rkskltyaqa rkllgledta ffkglrygkd naeastlmem kayhaisral |
| 361 | ekeglkdkks plnlspelqd eigtafslfk tdeditgrlk driqpeilea llkhisfdkf |
| 421 | vqislkalrr ivplmeqgkr ydeacaeiyg dhygkkntee kiylppipad eirnpvvlra |
| 481 | lsqarkving vvrrygspar ihietarevg ksfkdrkeie krqeenrkdr ekaaakfrey |
| 541 | fpnfvgepks kdilklrlye qqhgkclysg keinlgrlne kgyveidhal pfsrtwddsf |
| 601 | nnkvlvlgse nqnkgnqtpy eyfngkdnsr ewqefkarve tsrfprskkq rillqkfded |
| 661 | gfkernlndt ryvnrflcqf vadrmrltgk gkkrvfasng qitnllrgfw glrkvraend |
| 721 | rhhaldavvv acstvamqqk itrfvrykem nafdgktidk etgevlhqkt hfpqpweffa |
| 781 | qevmirvfgk pdgkpefeea dtpeklrtll aeklssrpea vheyvtplfv srapnrkmsg |
| 841 | qghmetvksa krldegvsvl rvpltqlklk dlekmvnrer epklyealka rleahkddpa |
| 901 | kafaepfyky dkagnrtqqv kavrveqvqk tgvwvrnhng iadnatmvrv dvfekgdkyy |
| 961 | lvpiyswqva kgilpdravv qgkdeedwql iddsfnfkfs lhpndlvevi tkkarmfgyf |
| 1021 | aschrgtgni nirihdldhk igkngilegi gvktalsfqk yqidelgkei rpcrlkkrpp |
| 1081 | vr |

[0358] An exemplary amino acid sequence of a Nme2Cas9 is provided below:

| type II CRISPR RNA-guided endonuclease Cas9 [Neisseria meningitidis] | |
|---|---|
| WP_002230835.1 | |
| (SEQ ID NO: 105) | |
| 1 | maafkpnpin yilgldigia svgwamveid eeenpirlid lgvrvferae vpktgdslam |
| 61 | arrlarsvrr ltrrrahrll rarrllkreg vlqaadfden glikslpntp wqlraaaldr |
| 121 | kltplewsav llhlikhrgy lsqrkneget adkelgallk gvannahalq tgdfrtpael |
| 181 | alnkfekesg hirnqrgdys htfsrkdlqa elillfekqk efgnphvsgg lkegietllm |
| 241 | tqrpalsgda vqkmlghctf epaepkaakn tytaerfiwl tklnnlrile qgserpltdt |
| 301 | eratlmdepy rkskltyaqa rkllgledta ffkglrygkd naeastlmem kayhaisral |
| 361 | ekeglkdkks plnlsselqd eigtafslfk tdeditgrlk drvqpeilea llkhisfdkf |
| 421 | vqislkalrr ivplmeqgkr ydeacaeiyg dhygkkntee kiylppipad eirnpvvlra |
| 481 | lsqarkving vvrrygspar ihietarevg ksfkdrkeie krqeenrkdr ekaaakfrey |
| 541 | fpnfvgepks kdilklrlye qqhgkclysg keinlvrlne kgyveidhal pfsrtwddsf |
| 601 | nnkvlvlgse nqnkgnqtpy eyfngkdnsr ewqefkarve tsrfprskkq rillqkfded |
| 661 | gfkecnlndt ryvnrflcqf vadhilltgk gkrrvfasng qitnllrgfw glrkvraend |
| 721 | rhhaldavvv acstvamqqk itrfvrykem nafdgktidk etgkvlhqkt hfpqpweffa |
| 781 | qevmirvfgk pdgkpefeea dtpeklrtll aeklssrpea vheyvtplfv srapnrkmsg |
| 841 | ahkdtlrsak rfvkhnekis vkrvwlteik ladlenmvny kngreielye alkarleayg |
| 901 | gnakqafdpk dnpfykkggq lvkavrvekt qesgvllnkk naytiadngd mvrvdvfckv |
| 961 | dkkgknqyfi vpiyawqvae nilpdidckg yriddsytfc fslhkydlia fqkdekskve |
| 1021 | fayyincdss ngrfylawhd kgskeqqfri stqnlvliqk yqvnelgkei rpcrlkkrpp |
| 1081 | vr |

[0359] In some embodiments, the Cas protein is a CasX or CasY. An exemplary CasX ((uniprot.org/uniprot/FONN87; uniprot.org/uniprot/F0NH53) tr|F0NN87|F0NN87_SULIHCRISPR-associatedCasx protein OS=Sulfolobus islandicus (strain HVE10/4) GN=SiH 0402 PE=4 SV=1) amino acid sequence is as follows:

(SEQ ID NO: 51)
MEVPLYNIFGDNYIIQVATEAENSTIYNNKVEIDDEELRNVLNLAYKIAK
NNEDAAAERRGKAKKKKGEEGETTTSNIILPLSGNDKNPWTETLKCYNFP
TTVALSEVFKNFSQVKECEEVSAPSFVKPEFYEFGRSPGMVERTRRVKLE
VEPHYLIIAAAGWVLTRLGKAKVSEGDYVGVNVFTPTRGILYSLIQNVNG
IVPGIKPETAFGLWIARKVVSSVTNPNVSVVRIYTISDAVGQNPTTINGG
FSIDLTKLLEKRYLLSERLEAIARNALSISSNMRERYIVLANYIYEYLTG
SKRLEDLLYFANRDLIMNLNSDDGKVRDLKLISAYVNGELIRGEG.

[0360] An exemplary CasX (>tr|F0NH₅₃|F0NH₅₃_SULIR CRISPR associated protein, Casx OS=Sulfolobus islandicus (strain REY15A) GN=SiRe 0771 PE=4 SV=1) amino acid sequence is as follows:

(SEQ ID NO: 52)
MEVPLYNIFGDNYIIQVATEAENSTIYNNKVEIDDEELRNVLNLAYKIAK
NNEDAAAERRGKAKKKKGEEGETTTSNIILPLSGNDKNPWTETLKCYNFP
TTVALSEVFKNFSQVKECEEVSAPSFVKPEFYKFGRSPGMVERTRRVKLE
VEPHYLIMAAAGWVLTRLGKAKVSEGDYVGVNVFTPTRGILYSLIQNVNG
IVPGIKPETAFGLWIARKVVSSVTNPNVSVVSIYTISDAVGQNPTTINGG
FSIDLTKLLEKRDLLSERLEAIARNALSISSNMRERYIVLANYIYEYLTG
SKRLEDLLYFANRDLIMNLNSDDGKVRDLKLISAYVNGELIRGEG.

[0361] Deltaproteobacteria CasX

(SEQ ID NO: 106)
MEKRINKIRKKLSADNATKPVSRSGPMKTLLVRVMTDDLKKRLEKRRKKP
EVMPQVISNNAANNLRMLLDDYTKMKEAILQVYWQEFKDDHVGLMCKFAQ
PASKKIDQNKLKPEMDEKGNLTTAGFACSQCGQPLFVYKLEQVSEKGKAY
TNYFGRCNVAEHEKLILLAQLKPVKDSDEAVTYSLGKFGQRALDFYSIHV
TKESTHPVKPLAQIAGNRYASGPVGKALSDACMGTIASFLSKYQDIIIEH
QKVVKGNQKRLESLRELAGKENLEYPSVTLPPQPHTKEGVDfAYNEVIAR
VRMWVNLNLWQKLKLSRDDAKPLLRLKGFPSFPVVERRENEVDWWNTINE
VKKLIDAKRDMGRVFWSGVTAEKRNTILEGYNYLPNENDHKKREGSLENP
KKPAKRQFGDLLLYLEKKYAGDWGKVFDEAWERIDKKIAGLTSHIEREEA
RNAEDAQSKAVLTDWLRAKASFVLERLKEMDEKEFYACEIQLQKWYGDLR
GNPFAVEAENRVVDISGFSIGSDGHSIQYRNLLAWKYLENGKREFYLLMN
YGKKGRIRFTDGTDIKKSGKWQGLLYGGGKAKVIDLTFDPDDEQLIILPL
AFGTRQGREFIWNDLLSLETGLIKLANGRVIEKTIYNKKIGRDEPALFVA
LTFERREVVDPSNIKPVNLIGVARGENIPAVIALTDPEGCPLPEFKDSSG
GPTDILRIGEGYKEKQRAIQAAKEVEQRRAGGYSRKFASKSRNLADDMVR
NSARDLFYHAVTHDAVLVFANLSRGFGRQGKRTFMTERQYTKMEDWLTAK
LAYEGLTSKTYLSKTLAQYTSKTCSNCGFTITYADMDVMLVRLKKTSDGW
ATTLNNKELKAEYQITYYNRYKRQTVEKELSAELDRLSEESGNNDISKWT
KGRRDEALFLLKKRFSHRPVQEQFVCLDCGHEVHAAEQAALNIARSWLFL
NSNSTEFKSYKSGKQPFVGAWQAFYKRRLKEVWKPNA

[0362] An exemplary CasY ((ncbi.nlm.nih.gov/protein/APG80656.1)>APG80656.1 CRISPR-associated protein CasY [uncultured Parcubacteria group bacterium]) amino acid sequence is as follows:

(SEQ ID NO: 54)
MSKRHPRISGVKGYRLHAQRLEYTGKSGAMRTIKYPLYSSPSGGRTVPRE
IVSAINDDYVGLYGLSNFDDLYNAEKRNEEKVYSVLDFWYDCVQYGAVFS
YTAPGLLKNVAEVRGGSYELTKTLKGSHLYDELQIDKVIKFLNKKEISRA
NGSLDKLKKDIIDCFKAEYRERHKDQCNKLADDIKNAKKDAGASLGERQK
KLFRDFFGISEQSENDKPSFTNPLNLTCCLLPFDTVNNNRNRGEVLFNKL
KEYAQKLDKNEGSLEMWEYIGIGNSGTAFSNFLGEGFLGRLRENKITELK
KAMMDITDAWRGQEQEEELEKRLRILAALTIKLREPKFDNHWGGYRSDIN
GKLSSWLQNYINQTVKIKEDLKGHKKDLKKAKEMINRFGESDTKEEAVVS
SLLESIEKIVPDDSADDEKPDIPAIAIYRRFLSDGRLTLNRFVQREDVQE
ALIKERLEAEKKKKPKKRKKKSDAEDEKETIDFKELFPHLAKPLKLVPNF
YGDSKRELYKKYKNAAIYTDALWKAVEKIYKSAFSSSLKNSFFDTDFDKD
FFIKRLQKIFSVYRRFNTDKWKPIVKNSFAPYCDIVSLAENEVLYKPKQS
RSRKSAAIDKNRVRLPSTENIAKAGIALARELSVAGFDWKDLLKKEEHEE
YIDLIELHKTALALLLAVTETQLDISALDFVENGTVKDFMKTRDGNLVLE
GRFLEMFSQSIVFSELRGLAGLMSRKEFITRSAIQTMNGKQAELLYIPHE
FQSAKITTPKEMSRAFLDLAPAEFATSLEPESLSEKSLLKLKQMRYYPHY
FGYELTRTGQGIDGGVAENALRLEKSPVKKREIKCKQYKTLGRGQNKIVL
YVRSSYYQTQFLEWFLHRPKNVQTDVAVSGSFLIDEKKVKTRWNYDALTV
ALEPVSGSERVFVSQPFTIFPEKSAEEEGQRYLGIDIGEYGIAYTALEIT
GDSAKILDQNFISDPQLKTLREEVKGLKLDQRRGTFAMPSTKIARIRESL
VHSLRNRIHHLALKHKAKIVYELEVSRFEEGKQKIKKVYATLKKADVYSE
IDADKNLQTTVWGKLAVASEISASYTSQFCGACKKLWRAEMQVDETITTQ
ELIGTVRVIKGGTLIDAIKDFMRPPIFDENDTPFPKYRDFCDKHHISKKM
RGNSCLFICPFCRANADADIQASQTIALLRYVKEEKKVEDYFERFRKLKN
IKVLGQMKKI.

[0363] The Cas9 nuclease has two functional endonuclease domains: RuvC and HNH. Cas9 undergoes a conformational change upon target binding that positions the nuclease domains to cleave opposite strands of the target DNA. The end result of Cas9-mediated DNA cleavage is a double-strand break (DSB) within the target DNA (˜3-4 nucleotides upstream of the PAM sequence). The resulting DSB is then repaired by one of two general repair pathways: (1) the efficient but error-prone non-homologous end joining (NHEJ) pathway; or (2) the less efficient but high-fidelity homology directed repair (HDR) pathway.

[0364] The “efficiency” of non-homologous end joining (NHEJ) and/or homology directed repair (HDR) can be calculated by any convenient method. For example, in some embodiments, efficiency can be expressed in terms of percentage of successful HDR. For example, a surveyor nuclease assay can be used to generate cleavage products and the ratio of products to substrate can be used to calculate the percentage. For example, a surveyor nuclease enzyme can be used that directly cleaves DNA containing a newly integrated restriction sequence as the result of successful HDR. More cleaved substrate indicates a greater percent HDR (a greater efficiency of HDR). As an illustrative example, a fraction (percentage) of HDR can be calculated using the following equation [(cleavage products)/(substrate plus cleavage products)] (e.g., (b+c)/(a+b+c), where “a” is the band intensity of DNA substrate and “b” and “c” are the cleavage products).

[0365] In some embodiments, efficiency can be expressed in terms of percentage of successful NHEJ. For example, a T7 endonuclease I assay can be used to generate cleavage products and the ratio of products to substrate can be used to calculate the percentage NHEJ. T7 endonuclease I cleaves mismatched heteroduplex DNA which arises from hybridization of wild-type and mutant DNA strands (NHEJ generates small random insertions or deletions (indels) at the site of the original break). More cleavage indicates a greater percent NHEJ (a greater efficiency of NHEJ). As an illustrative example, a fraction (percentage) of NHEJ can be calculated using the following equation: (1−(1−(b+c)/(a+b+c))^{1/2})×100, where “a” is the band intensity of DNA substrate and “b” and “c” are the cleavage products (Ran et. al., Cell. 2013 Sep. 12; 154(6):1380-9; and Ran et al., Nat Protoc. 2013 November; 8(11): 2281-2308).

[0366] The NHEJ repair pathway is the most active repair mechanism, and it frequently causes small nucleotide insertions or deletions (indels) at the DSB site. The randomness of NHEJ-mediated DSB repair has important practical implications, because a population of cells expressing Cas9 and a gRNA or a guide polynucleotide can result in a diverse array of mutations. In most embodiments, NHEJ gives rise to small indels in the target DNA that result in amino acid deletions, insertions, or frameshift mutations leading to premature stop codons within the open reading frame (ORF) of the targeted gene. The ideal end result is a loss-of-function mutation within the targeted gene.

[0367] While NHEJ-mediated DSB repair often disrupts the open reading frame of the gene, homology directed repair (HDR) can be used to generate specific nucleotide changes ranging from a single nucleotide change to large insertions like the addition of a fluorophore or tag.

[0368] In order to utilize HDR for gene editing, a DNA repair template containing the desired sequence can be delivered into the cell type of interest with the gRNA(s) and Cas9 or Cas9 nickase. The repair template can contain the desired edit as well as additional homologous sequence immediately upstream and downstream of the target (termed left & right homology arms). The length of each homology arm can be dependent on the size of the change being introduced, with larger insertions requiring longer homology arms. The repair template can be a single-stranded oligonucleotide, double-stranded oligonucleotide, or a double-stranded DNA plasmid. The efficiency of HDR is generally low (<10% of modified alleles) even in cells that express Cas9, gRNA and an exogenous repair template. The efficiency of HDR can be enhanced by synchronizing the cells, since HDR takes place during the S and G2 phases of the cell cycle. Chemically or genetically inhibiting genes involved in NHEJ can also increase HDR frequency.

[0369] In some embodiments, Cas9 is a modified Cas9. A given gRNA targeting sequence can have additional sites throughout the genome where partial homology exists. These sites are called off-targets and need to be considered when designing a gRNA. In addition to optimizing gRNA design, CRISPR specificity can also be increased through modifications to Cas9. Cas9 generates double-strand breaks (DSBs) through the combined activity of two nuclease domains, RuvC and HNH. Cas9 nickase, a D10A mutant of SpCas9, retains one nuclease domain and generates a DNA nick rather than a DSB. The nickase system can also be combined with HDR-mediated gene editing for specific gene edits.

[0370] In some embodiments, Cas9 is a variant Cas9 protein. A variant Cas9 polypeptide has an amino acid sequence that is different by one amino acid (e.g., has a deletion, insertion, substitution, fusion) when compared to the amino acid sequence of a wild-type Cas9 protein. In some instances, the variant Cas9 polypeptide has an amino acid change (e.g., deletion, insertion, or substitution) that reduces the nuclease activity of the Cas9 polypeptide. For example, in some instances, the variant Cas9 polypeptide has less than 50%, less than 40%, less than 30%, less than 20%, less than 10%, less than 5%, or less than 1% of the nuclease activity of the corresponding wild-type Cas9 protein. In some embodiments, the variant Cas9 protein has no substantial nuclease activity. When a subject Cas9 protein is a variant Cas9 protein that has no substantial nuclease activity, it can be referred to as “dCas9.”

[0371] In some embodiments, a variant Cas9 protein has reduced nuclease activity. For example, a variant Cas9 protein exhibits less than about 20%, less than about 15%, less than about 10%, less than about 5%, less than about 1%, or less than about 0.1%, of the endonuclease activity of a wild-type Cas9 protein, e.g., a wild-type Cas9 protein.

[0372] In some embodiments, a variant Cas9 protein can cleave the complementary strand of a guide target sequence but has reduced ability to cleave the non-complementary strand of a double stranded guide target sequence. For example, the variant Cas9 protein can have a mutation (amino acid substitution) that reduces the function of the RuvC domain. As a non-limiting example, in some embodiments, a variant Cas9 protein has a D10A (aspartate to alanine at amino acid position 10) and can therefore cleave the complementary strand of a double stranded guide target sequence but has reduced ability to cleave the non-complementary strand of a double stranded guide target sequence (thus resulting in a single strand break (SSB) instead of a double strand break (DSB) when the variant Cas9 protein cleaves a double stranded target nucleic acid) (see, for example, Jinek et al., Science. 2012 Aug. 17; 337(6096):816-21).

[0373] In some embodiments, a variant Cas9 protein can cleave the non-complementary strand of a double stranded guide target sequence but has reduced ability to cleave the complementary strand of the guide target sequence. For example, the variant Cas9 protein can have a mutation (amino acid substitution) that reduces the function of the HNH domain (RuvC/HNH/RuvC domain motifs). As a non-limiting example, in some embodiments, the variant Cas9 protein has an H840A (histidine to alanine at amino acid position 840) mutation and can therefore cleave the non-complementary strand of the guide target sequence but has reduced ability to cleave the complementary strand of the guide target sequence (thus resulting in a SSB instead of a DSB when the variant Cas9 protein cleaves a double stranded guide target sequence). Such a Cas9 protein has a reduced ability to cleave a guide target sequence (e.g., a single stranded guide target sequence) but retains the ability to bind a guide target sequence (e.g., a single stranded guide target sequence).

[0374] In some embodiments, a variant Cas9 protein has a reduced ability to cleave both the complementary and the non-complementary strands of a double stranded target DNA. As a non-limiting example, in some embodiments, the variant Cas9 protein harbors both the D10A and the H840A mutations such that the polypeptide has a reduced ability to cleave both the complementary and the non-complementary strands of a double stranded target DNA. Such a Cas9 protein has a reduced ability to cleave a target DNA (e.g., a single stranded target DNA) but retains the ability to bind a target DNA (e.g., a single stranded target DNA).

[0375] As another non-limiting example, in some embodiments, the variant Cas9 protein harbors W476A and W1126A mutations such that the polypeptide has a reduced ability to cleave a target DNA. Such a Cas9 protein has a reduced ability to cleave a target DNA (e.g., a single stranded target DNA) but retains the ability to bind a target DNA (e.g., a single stranded target DNA).

[0376] As another non-limiting example, in some embodiments, the variant Cas9 protein harbors P475A, W476A, N477A, D1125A, W1126A, and D1127A mutations such that the polypeptide has a reduced ability to cleave a target DNA. Such a Cas9 protein has a reduced ability to cleave a target DNA (e.g., a single stranded target DNA) but retains the ability to bind a target DNA (e.g., a single stranded target DNA).

[0377] As another non-limiting example, in some embodiments, the variant Cas9 protein harbors H840A, W476A, and W1126A, mutations such that the polypeptide has a reduced ability to cleave a target DNA. Such a Cas9 protein has a reduced ability to cleave a target DNA (e.g., a single stranded target DNA) but retains the ability to bind a target DNA (e.g., a single stranded target DNA). As another non-limiting example, in some embodiments, the variant Cas9 protein harbors H840A, D10A, W476A, and W1126A, mutations such that the polypeptide has a reduced ability to cleave a target DNA. Such a Cas9 protein has a reduced ability to cleave a target DNA (e.g., a single stranded target DNA) but retains the ability to bind a target DNA (e.g., a single stranded target DNA). In some embodiments, the variant Cas9 has restored catalytic His residue at position 840 in the Cas9 HNH domain (A840H).

[0378] As another non-limiting example, in some embodiments, the variant Cas9 protein harbors, H840A, P475A, W476A, N477A, D1125A, W1126A, and D1127A mutations such that the polypeptide has a reduced ability to cleave a target DNA. Such a Cas9 protein has a reduced ability to cleave a target DNA (e.g., a single stranded target DNA) but retains the ability to bind a target DNA (e.g., a single stranded target DNA). As another non-limiting example, in some embodiments, the variant Cas9 protein harbors D10A, H840A, P475A, W476A, N477A, D1125A, W1126A, and D1127A mutations such that the polypeptide has a reduced ability to cleave a target DNA. Such a Cas9 protein has a reduced ability to cleave a target DNA (e.g., a single stranded target DNA) but retains the ability to bind a target DNA (e.g., a single stranded target DNA). In some embodiments, when a variant Cas9 protein harbors W476A and W1126A mutations or when the variant Cas9 protein harbors P475A, W476A, N477A, D1125A, W1126A, and D1127A mutations, the variant Cas9 protein does not bind efficiently to a PAM sequence. Thus, in some such embodiments, when such a variant Cas9 protein is used in a method of binding, the method does not require a PAM sequence. In other words, in some embodiments, when such a variant Cas9 protein is used in a method of binding, the method can include a guide RNA, but the method can be performed in the absence of a PAM sequence (and the specificity of binding is therefore provided by the targeting segment of the guide RNA). Other residues can be mutated to achieve the above effects (i.e., inactivate one or the other nuclease portions). As non-limiting examples, residues D10, G12, G17, E762, H840, N854, N863, H982, H983, A984, D986, and/or A987 can be altered (i.e., substituted). Also, mutations other than alanine substitutions are suitable.

[0379] In some embodiments, a variant Cas9 protein that has reduced catalytic activity (e.g., when a Cas9 protein has a D10, G12, G17, E762, H840, N854, N863, H982, H983, A984, D986, and/or a A987 mutation, e.g., D10A, G12A, G17A, E762A, H840A, N854A, N863A, H982A, H983A, A984A, and/or D986A), the variant Cas9 protein can still bind to target DNA in a site-specific manner (because it is still guided to a target DNA sequence by a guide RNA) as long as it retains the ability to interact with the guide RNA.

[0380] In some embodiments, the variant Cas protein can be spCas9, spCas9-VRQR, spCas9-VRER, xCas9 (sp), saCas9, saCas9-KKH, spCas9-MQKSER, spCas9-LRKIQK, or spCas9-LRVSQL.

[0381] In some embodiments, a modified SpCas9 including amino acid substitutions D1135M, S1136Q, G1218K, E1219F, A1322R, D1332A, R1335E, and T1337R (SpCas9-MQKFRAER) and having specificity for the altered PAM 5′-NGC-3′ was used.

[0382] Alternatives to S. pyogenes Cas9 can include RNA-guided endonucleases from the Cpf1 family that display cleavage activity in mammalian cells. CRISPR from Prevotella and Francisella 1 (CRISPR/Cpf1) is a DNA-editing technology analogous to the CRISPR/Cas9 system. Cpf1 is an RNA-guided endonuclease of a class II CRISPR/Cas system. This acquired immune mechanism is found in Prevotella and Francisella bacteria. Cpf1 genes are associated with the CRISPR locus, coding for an endonuclease that use a guide RNA to find and cleave viral DNA. Cpf1 is a smaller and simpler endonuclease than Cas9, overcoming some of the CRISPR/Cas9 system limitations. Unlike Cas9 nucleases, the result of Cpf1-mediated DNA cleavage is a double-strand break with a short 3′ overhang. Cpf1's staggered cleavage pattern can open up the possibility of directional gene transfer, analogous to traditional restriction enzyme cloning, which can increase the efficiency of gene editing. Like the Cas9 variants and orthologues described above, Cpf1 can also expand the number of sites that can be targeted by CRISPR to AT-rich regions or AT-rich genomes that lack the NGG PAM sites favored by SpCas9. The Cpf1 locus contains a mixed alpha/beta domain, a RuvC-I followed by a helical region, a RuvC-II and a zinc finger-like domain. The Cpf1 protein has a RuvC-like endonuclease domain that is similar to the RuvC domain of Cas9. Furthermore, Cpf1 does not have a HNH endonuclease domain, and the N-terminal of Cpf1 does not have the alpha-helical recognition lobe of Cas9. Cpf1 CRISPR-Cas domain architecture shows that Cpf1 is functionally unique, being classified as Class 2, type V CRISPR system. The Cpf1 loci encode Cast, Cas2 and Cas4 proteins more similar to types I and III than from type II systems. Functional Cpf1 doesn't need the trans-activating CRISPR RNA (tracrRNA), therefore, only CRISPR (crRNA) is required. This benefits genome editing because Cpf1 is not only smaller than Cas9, but also it has a smaller sgRNA molecule (proximately half as many nucleotides as Cas9). The Cpf1-crRNA complex cleaves target DNA or RNA by identification of a protospacer adjacent motif 5′-YTN-3′ in contrast to the G-rich PAM targeted by Cas9. After identification of PAM, Cpf1 introduces a sticky-end-like DNA double-stranded break of 4 or 5 nucleotides overhang.

### Cas12 Domains of Nucleobase Editors

[0383] Typically, microbial CRISPR-Cas systems are divided into Class 1 and Class 2 systems. Class 1 systems have multisubunit effector complexes, while Class 2 systems have a single protein effector. For example, Cas9 and Cpf1 are Class 2 effectors, albeit different types (Type II and Type V, respectively). In addition to Cpf1, Class 2, Type V CRISPR-Cas systems also comprise Cas12a/Cpf1, Cas12b/C2c1, Cas12c/C2c3, Cas12d/CasY, Cas12e/CasX, Cas12g, Cas12 h, and Cas12i). See, e.g., Shmakov et al., “Discovery and Functional Characterization of Diverse Class 2 CRISPR Cas Systems,” Mol. Cell, 2015 Nov. 5; 60(3): 385-397; Makarova et al., “Classification and Nomenclature of CRISPR-Cas Systems: Where from Here?” CRISPR Journal, 2018, 1(5): 325-336; and Yan et al., “Functionally Diverse Type V CRISPR-Cas Systems,” Science, 2019 Jan. 4; 363: 88-91; the entire contents of each is hereby incorporated by reference. Type V Cas proteins contain a RuvC (or RuvC-like) endonuclease domain. While production of mature CRISPR RNA (crRNA) is generally tracrRNA-independent, Cas12b/C2c1, for example, requires tracrRNA for production of crRNA. Cas12b/C2c1 depends on both crRNA and tracrRNA for DNA cleavage.

[0384] Nucleic acid programmable DNA binding proteins contemplated in the present invention include Cas proteins that are classified as Class 2, Type V (Cas12 proteins). Non-limiting examples of Cas Class 2, Type V proteins include Cas12a/Cpf1, Cas12b/C2c1, Cas12c/C2c3, Cas12d/CasY, Cas12e/CasX, Cas12g, Cas12 h, and Cas12i, homologues thereof, or modified versions thereof. As used herein, a Cas12 protein can also be referred to as a Cas12 nuclease, a Cas12 domain, or a Cas12 protein domain. In some embodiments, the Cas12 proteins of the present invention comprise an amino acid sequence interrupted by an internally fused protein domain such as a deaminase domain.

[0385] In some embodiments, the Cas12 domain is a nuclease inactive Cas12 domain or a Cas12 nickase. In some embodiments, the Cas12 domain is a nuclease active domain. For example, the Cas12 domain may be a Cas12 domain that nicks one strand of a duplexed nucleic acid (e.g., duplexed DNA molecule). In some embodiments, the Cas12 domain comprises any one of the amino acid sequences as set forth herein. In some embodiments the Cas12 domain comprises an amino acid sequence that is at least 60%, at least 65%, at least 70%, at least 75%, at least 80%, at least 85%, at least 90%, at least 95%, at least 96%, at least 97%, at least 98%, at least 99%, or at least 99.5% identical to any one of the amino acid sequences set forth herein. In some embodiments, the Cas12 domain comprises an amino acid sequence that has 1, 2, 3, 4, 5, 6, 7, 8, 9, 10, 11, 12, 13, 14, 15, 16, 17, 18, 19, 20, 21, 22, 21, 24, 25, 26, 27, 28, 29, 30, 31, 32, 33, 34, 35, 36, 37, 38, 39, 40, 41, 42, 43, 44, 45, 46, 47, 48, 49, 50 or more mutations compared to any one of the amino acid sequences set forth herein. In some embodiments, the Cas12 domain comprises an amino acid sequence that has at least 10, at least 15, at least 20, at least 30, at least 40, at least 50, at least 60, at least 70, at least 80, at least 90, at least 100, at least 150, at least 200, at least 250, at least 300, at least 350, at least 400, at least 500, at least 600, at least 700, at least 800, at least 900, at least 1000, at least 1100, or at least 1200 identical contiguous amino acid residues as compared to any one of the amino acid sequences set forth herein.

[0386] In some embodiments, proteins comprising fragments of Cas12 are provided. For example, in some embodiments, a protein comprises one of two Cas12 domains: (1) the gRNA binding domain of Cas12; or (2) the DNA cleavage domain of Cas12. In some embodiments, proteins comprising Cas12 or fragments thereof are referred to as “Cas12 variants.” A Cas12 variant shares homology to Cas12, or a fragment thereof. For example, a Cas12 variant is at least about 70% identical, at least about 80% identical, at least about 90% identical, at least about 95% identical, at least about 96% identical, at least about 97% identical, at least about 98% identical, at least about 99% identical, at least about 99.5% identical, or at least about 99.9% identical to wild type Cas12. In some embodiments, the Cas12 variant may have 1, 2, 3, 4, 5, 6, 7, 8, 9, 10, 11, 12, 13, 14, 15, 16, 17, 18, 19, 20, 21, 22, 21, 24, 25, 26, 27, 28, 29, 30, 31, 32, 33, 34, 35, 36, 37, 38, 39, 40, 41, 42, 43, 44, 45, 46, 47, 48, 49, 50 or more amino acid changes compared to wild type Cas12. In some embodiments, the Cas12 variant comprises a fragment of Cas12 (e.g., a gRNA binding domain or a DNA cleavage domain), such that the fragment is at least about 70% identical, at least about 80% identical, at least about 90% identical, at least about 95% identical, at least about 96% identical, at least about 97% identical, at least about 98% identical, at least about 99% identical, at least about 99.5% identical, or at least about 99.9% identical to the corresponding fragment of wild type Cas12. In some embodiments, the fragment is at least 30%, at least 35%, at least 40%, at least 45%, at least 50%, at least 55%, at least 60%, at least 65%, at least 70%, at least 75%, at least 80%, at least 85%, at least 90%, at least 95% identical, at least 96%, at least 97%, at least 98%, at least 99%, or at least 99.5% of the amino acid length of a corresponding wild type Cas12. In some embodiments, the fragment is at least 100 amino acids in length. In some embodiments, the fragment is at least 100, 150, 200, 250, 300, 350, 400, 450, 500, 550, 600, 650, 700, 750, 800, 850, 900, 950, 1000, 1050, 1100, 1150, 1200, 1250, or at least 1300 amino acids in length.

[0387] In some embodiments, Cas12 corresponds to, or comprises in part or in whole, a Cas12 amino acid sequence having one or more mutations that alter the Cas12 nuclease activity. Such mutations, by way of example, include amino acid substitutions within the RuvC nuclease domain of Cas12. In some embodiments, variants or homologues of Cas12 are provided which are at least about 70% identical, at least about 80% identical, at least about 90% identical, at least about 95% identical, at least about 98% identical, at least about 99% identical, at least about 99.5% identical, or at least about 99.9% identical to a wild type Cas12. In some embodiments, variants of Cas12 are provided having amino acid sequences which are shorter, or longer, by about 5 amino acids, by about 10 amino acids, by about 15 amino acids, by about 20 amino acids, by about 25 amino acids, by about 30 amino acids, by about 40 amino acids, by about 50 amino acids, by about 75 amino acids, by about 100 amino acids or more.

[0388] In some embodiments, Cas12 fusion proteins as provided herein comprise the full-length amino acid sequence of a Cas12 protein, e.g., one of the Cas12 sequences provided herein. In other embodiments, however, fusion proteins as provided herein do not comprise a full-length Cas12 sequence, but only one or more fragments thereof. Exemplary amino acid sequences of suitable Cas12 domains are provided herein, and additional suitable sequences of Cas12 domains and fragments will be apparent to those of skill in the art.

[0389] Generally, the class 2, Type V Cas proteins have a single functional RuvC endonuclease domain (See, e.g., Chen et al., “CRISPR-Cas12a target binding unleashes indiscriminate single-stranded DNase activity,” Science 360:436-439 (2018)). In some cases, the Cas12 protein is a variant Cas12b protein. (See Strecker et al., Nature Communications, 2019, 10(1): Art. No.: 212). In one embodiment, a variant Cas12 polypeptide has an amino acid sequence that is different by 1, 2, 3, 4, 5 or more amino acids (e.g., has a deletion, insertion, substitution, fusion) when compared to the amino acid sequence of a wild type Cas12 protein. In some instances, the variant Cas12 polypeptide has an amino acid change (e.g., deletion, insertion, or substitution) that reduces the activity of the Cas12 polypeptide. For example, in some instances, the variant Cas12 is a Cas12b polypeptide that has less than 50%, less than 40%, less than 30%, less than 20%, less than 10%, less than 5%, or less than 1% of the nickase activity of the corresponding wild-type Cas12b protein. In some cases, the variant Cas12b protein has no substantial nickase activity.

[0390] In some cases, a variant Cas12b protein has reduced nickase activity. For example, a variant Cas12b protein exhibits less than about 20%, less than about 15%, less than about 10%, less than about 5%, less than about 1%, or less than about 0.1%, of the nickase activity of a wild-type Cas12b protein.

[0391] In some embodiments, the Cas12 protein includes RNA-guided endonucleases from the Cas12a/Cpf1 family that displays activity in mammalian cells. CRISPR from Prevotella and Francisella 1 (CRISPR/Cpf1) is a DNA editing technology analogous to the CRISPR/Cas9 system. Cpf1 is an RNA-guided endonuclease of a class II CRISPR/Cas system. This acquired immune mechanism is found in Prevotella and Francisella bacteria. Cpf1 genes are associated with the CRISPR locus, coding for an endonuclease that use a guide RNA to find and cleave viral DNA. Cpf1 is a smaller and simpler endonuclease than Cas9, overcoming some of the CRISPR/Cas9 system limitations. Unlike Cas9 nucleases, the result of Cpf1-mediated DNA cleavage is a double-strand break with a short 3′ overhang. Cpf1's staggered cleavage pattern can open up the possibility of directional gene transfer, analogous to traditional restriction enzyme cloning, which can increase the efficiency of gene editing. Like the Cas9 variants and orthologues described above, Cpf1 can also expand the number of sites that can be targeted by CRISPR to AT-rich regions or AT-rich genomes that lack the NGG PAM sites favored by SpCas9. The Cpf1 locus contains a mixed alpha/beta domain, a RuvC-I followed by a helical region, a RuvC-II and a zinc finger-like domain. The Cpf1 protein has a RuvC-like endonuclease domain that is similar to the RuvC domain of Cas9. Furthermore, Cpf1, unlike Cas9, does not have a HNH endonuclease domain, and the N-terminal of Cpf1 does not have the alpha-helical recognition lobe of Cas9. Cpf1 CRISPR-Cas domain architecture shows that Cpf1 is functionally unique, being classified as Class 2, type V CRISPR system. The Cpf1 loci encode Cast, Cas2, and Cas4 proteins are more similar to types I and III than type II systems. Functional Cpf1 does not require the trans-activating CRISPR RNA (tracrRNA), therefore, only CRISPR (crRNA) is required. This benefits genome editing because Cpf1 is not only smaller than Cas9, but also it has a smaller sgRNA molecule (approximately half as many nucleotides as Cas9). The Cpf1-crRNA complex cleaves target DNA or RNA by identification of a protospacer adjacent motif 5′-YTN-3′ or 5′-TTTN-3′ in contrast to the G-rich PAM targeted by Cas9. After identification of PAM, Cpf1 introduces a sticky-end-like DNA double-stranded break having an overhang of 4 or 5 nucleotides.

[0392] In some aspects of the present invention, a vector encodes a CRISPR enzyme that is mutated to with respect to a corresponding wild-type enzyme such that the mutated CRISPR enzyme lacks the ability to cleave one or both strands of a target polynucleotide containing a target sequence can be used. Cas12 can refer to a polypeptide with at least or at least about 50%, 60%, 70%, 80%, 90%, 91%, 92%, 93%, 94%, 95%, 96%, 97%, 98%, 99%, or 100% sequence identity and/or sequence homology to a wild type exemplary Cas12 polypeptide (e.g., Cas12 from Bacillus hisashii). Cas12 can refer to a polypeptide with at most or at most about 50%, 60%, 70%, 80%, 90%, 91%, 92%, 93%, 94%, 95%, 96%, 97%, 98%, 99%, or 100% sequence identity and/or sequence homology to a wild type exemplary Cas12 polypeptide (e.g., from Bacillus hisashii (BhCas12b), Bacillus sp. V3-13 (BvCas12b), and Alicyclobacillus acidiphilus (AaCas12b)). Cas12 can refer to the wild type or a modified form of the Cas12 protein that can comprise an amino acid change such as a deletion, insertion, substitution, variant, mutation, fusion, chimera, or any combination thereof.

### Nucleic Acid Programmable DNA Binding Proteins

[0393] Some aspects of the disclosure provide fusion proteins comprising domains that act as nucleic acid programmable DNA binding proteins, which may be used to guide a protein, such as a base editor, to a specific nucleic acid (e.g., DNA or RNA) sequence. In particular embodiments, a fusion protein comprises a nucleic acid programmable DNA binding protein domain and a deaminase domain. Non-limiting examples of nucleic acid programmable DNA binding proteins include, Cas9 (e.g., dCas9 and nCas9), Cas12a/Cpf1, Cas12b/C2c1, Cas12c/C2c3, Cas12d/CasY, Cas12e/CasX, Cas12g, Cas12 h, and Cas12i. Non-limiting examples of Cas enzymes include Cas1, Cas1B, Cas2, Cas3, Cas4, Cas5, Cas5d, Cas5t, Cas5 h, CasSa, Cas6, Cas7, Cas8, Cas8a, Cas8b, Cas8c, Cas9 (also known as Csn1 or Csx12), Cas10, Cas10d, Cas12a/Cpf1, Cas12b/C2c1, Cas12c/C2c3, Cas12d/CasY, Cas12e/CasX, Cas12g, Cas12 h, Cas12i, Csy1, Csy2, Csy3, Csy4, Cse1, Cse2, Cse3, Cse4, Cse5e, Csc1, Csc2, Csa5, Csn1, Csn2, Csm1, Csm2, Csm3, Csm4, Csm5, Csm6, Cmr1, Cmr3, Cmr4, Cmr5, Cmr6, Csb1, Csb2, Csb3, Csx17, Csx14, Csx10, Csx16, CsaX, Csx3, Csx1, Csx1S, Csx11, Csf1, Csf2, CsO, Csf4, Csd1, Csd2, Cst1, Cst2, Csh1, Csh2, Csa1, Csa2, Csa3, Csa4, Csa5, Type II Cas effector proteins, Type V Cas effector proteins, Type VI Cas effector proteins, CARF, DinG, homologues thereof, or modified or engineered versions thereof. Other nucleic acid programmable DNA binding proteins are also within the scope of this disclosure, although they may not be specifically listed in this disclosure. See, e.g., Makarova et al. “Classification and Nomenclature of CRISPR-Cas Systems: Where from Here?” CRISPR J. 2018 October; 1:325-336. doi: 10.1089/crispr.2018.0033; Yan et al., “Functionally diverse type V CRISPR-Cas systems” Science. 2019 Jan. 4; 363(6422):88-91. doi: 10.1126/science.aav7271, the entire contents of each are hereby incorporated by reference.

[0394] One example of a nucleic acid programmable DNA-binding protein that has different PAM specificity than Cas9 is Clustered Regularly Interspaced Short Palindromic Repeats from Prevotella and Francisella 1 (Cpf1). Similar to Cas9, Cpf1 is also a class 2 CRISPR effector. It has been shown that Cpf1 mediates robust DNA interference with features distinct from Cas9. Cpf1 is a single RNA-guided endonuclease lacking tracrRNA, and it utilizes a T-rich protospacer-adjacent motif (TTN, TTTN, or YTN). Moreover, Cpf1 cleaves DNA via a staggered DNA double-stranded break. Out of 16 Cpf1-family proteins, two enzymes from Acidaminococcus and Lachnospiraceae are shown to have efficient genome-editing activity in human cells. Cpf1 proteins are known in the art and have been described previously, for example Yamano et al., “Crystal structure of Cpf1 in complex with guide RNA and target DNA.” Cell (165) 2016, p. 949-962; the entire contents of which is hereby incorporated by reference.

[0395] Useful in the present compositions and methods are nuclease-inactive Cpf1 (dCpf1) variants that may be used as a guide nucleotide sequence-programmable DNA-binding protein domain. The Cpf1 protein has a RuvC-like endonuclease domain that is similar to the RuvC domain of Cas9 but does not have a HNH endonuclease domain, and the N-terminal of Cpf1 does not have the alfa-helical recognition lobe of Cas9. It was shown in Zetsche et al., Cell, 163, 759-771, 2015 (which is incorporated herein by reference) that, the RuvC-like domain of Cpf1 is responsible for cleaving both DNA strands and inactivation of the RuvC-like domain inactivates Cpf1 nuclease activity. For example, mutations corresponding to D917A, E1006A, or D1255A in Francisella novicida Cpf1 inactivate Cpf1 nuclease activity. In some embodiments, the dCpf1 of the present disclosure comprises mutations corresponding to D917A, E1006A, D1255A, D917A/E1006A, D917A/D1255A, E1006A/D1255A, or D917A/E1006A/D1255A. It is to be understood that any mutations, e.g., substitution mutations, deletions, or insertions that inactivate the RuvC domain of Cpf1, may be used in accordance with the present disclosure.

[0396] In some embodiments, the nucleic acid programmable DNA binding protein (napDNAbp) of any of the fusion proteins provided herein may be a Cpf1 protein. In some embodiments, the Cpf1 protein is a Cpf1 nickase (nCpf1). In some embodiments, the Cpf1 protein is a nuclease inactive Cpf1 (dCpf1). In some embodiments, the Cpf1, the nCpf1, or the dCpf1 comprises an amino acid sequence that is at least 85%, at least 90%, at least 91%, at least 92%, at least 93%, at least 94%, at least 95%, at least 96%, at least 97%, at least 98%, at least 99%, or at least 99.5% identical to a Cpf1 sequence disclosed herein. In some embodiments, the dCpf1 comprises an amino acid sequence that is at least 85%, at least 90%, at least 91%, at least 92%, at least 93%, at least 94%, at least 95%, at least 96%, at least 97%, at least 98%, at least 99%, or at ease 99.5% identical to a Cpf1 sequence disclosed herein, and comprises mutations corresponding to D917A, E1006A, D1255A, D917A/E1006A, D917A/D1255A, E1006A/D1255A, or D917A/E1006A/D1255A. It should be appreciated that Cpf1 from other bacterial species may also be used in accordance with the present disclosure.

Wild-Type Francisella novicida Cpf1 (D917, E1006, and D1255 are Bolded and Underlined)

(SEQ ID NO: 107)
MSIYQEFVNKYSLSKTLRFELIPQGKTLENIKARGLILDDEKRAKDYKKAKQIIDKYHQFFI
EEILSSVCISEDLLQNYSDVYFKLKKSDDDNLQKDFKSAKDTIKKQISEYIKDSEKFKNLFN
QNLIDAKKGQESDLILWLKQSKDNGIELFKANSDITDIDEALEIIKSFKGWTTYFKGFHENR
KNVYSSNDIPTSIIYRIVDDNLPKFLENKAKYESLKDKAPEAINYEQIKKDLAEELTFDIDY
KTSEVNQRVFSLDEVFEIANFNNYLNQSGITKFNTIIGGKFVNGENTKRKGINEYINLYSQQ
INDKTLKKYKMSVLFKQILSDTESKSFVIDKLEDDSDVVTTMQSFYEQIAAFKTVEEKSIKE
TLSLLFDDLKAQKLDLSKIYFKNDKSLTDLSQQVFDDYSVIGTAVLEYITQQIAPKNLDNPS
KKEQELIAKKTEKAKYLSLETIKLALEEFNKHRDIDKQCRFEEILANFAAIPMIFDEIAQNK
DNLAQISIKYQNQGKKDLLQASAEDDVKAIKDLLDQTNNLLHKLKIFHISQSEDKANILDKD
EHFYLVFEECYFELANIVPLYNKIRNYITQKPYSDEKFKLNFENSTLANGWDKNKEPDNTAI
LFIKDDKYYLGVMNKKNNKIFDDKAIKENKGEGYKKIVYKLLPGANKMLPKVFFSAKSIKFY
NPSEDILRIRNHSTHTKNGSPQKGYEKFEFNIEDCRKFIDFYKQSISKHPEWKDFGFRFSDT
QRYNSIDEFYREVENQGYKLTFENISESYIDSVVNQGKLYLFQIYNKDFSAYSKGRPNLHTL
YWKALFDERNLQDVVYKLNGEAELFYRKQSIPKKITHPAKEAIANKNKDNPKKESVFEYDLI
KDKRFTEDKFFFHCPITINFKSSGANKFNDEINLLLKEKANDVHILSIDRGERHLAYYTLVD
GKGNIIKQDTFNIIGNDRMKTNYHDKLAAIEKDRDSARKDWKKINNIKEMKEGYLSQVVHEI
AKLVIEYNAIVVFEDLNFGFKRGRFKVEKQVYQKLEKMLIEKLNYLVFKDNEFDKTGGVLRA
YQLTAPFETFKKMGKQTGIIYYVPAGFTSKICPVTGFVNQLYPKYESVSKSQEFFSKFDKIC
YNLDKGYFEFSFDYKNFGDKAAKGKWTIASFGSRLINFRNSDKNHNWDTREVYPTKELEKLL
KDYSIEYGHGECIKAAICGESDKKFFAKLTSVLNTILQMRNSKTGTELDYLISPVADVNGNF
FDSRQAPKNMPQDADANGAYHIGLKGLMLLGRIKNNQEGKKLNLVIKNEEYFEFVQNRNN
Francisella novicida Cpf1 D917A (A917, E1006, and D1255 are
bolded and underlined)
(SEQ ID NO: 108)
MSIYQEFVNKYSLSKTLRFELIPQGKTLENIKARGLILDDEKRAKDYKKAKQIIDKYHQFFI
EEILSSVCISEDLLQNYSDVYFKLKKSDDDNLQKDFKSAKDTIKKQISEYIKDSEKFKNLFN
QNLIDAKKGQESDLILWLKQSKDNGIELFKANSDITDIDEALEIIKSFKGWTTYFKGFHENR
KNVYSSNDIPTSIIYRIVDDNLPKFLENKAKYESLKDKAPEAINYEQIKKDLAEELTFDIDY
KTSEVNQRVFSLDEVFEIANFNNYLNQSGITKFNTIIGGKFVNGENTKRKGINEYINLYSQQ
INDKTLKKYKMSVLFKQILSDTESKSEVIDKLEDDSDVVTTMQSFYEQIAAFKTVEEKSIKE
TLSLLFDDLKAQKLDLSKIYFKNDKSLTDLSQQVFDDYSVIGTAVLEYITQQIAPKNLDNPS
KKEQELIAKKTEKAKYLSLETIKLALEEFNKHRDIDKQCRFEEILANFAAIPMIFDEIAQNK
DNLAQISIKYQNQGKKDLLQASAEDDVKAIKDLLDQTNNLLHKLKIFHISQSEDKANILDKD
EHFYLVFEECYFELANIVPLYNKIRNYITQKPYSDEKFKLNFENSTLANGWDKNKEPDNTAI
LFIKDDKYYLGVMNKKNNKIFDDKAIKENKGEGYKKIVYKLLPGANKMLPKVFFSAKSIKFY
NPSEDILRIRNHSTHTKNGSPQKGYEKFEFNIEDCRKFIDFYKQSISKHPEWKDFGFRFSDT
QRYNSIDEFYREVENQGYKLTFENISESYIDSVVNQGKLYLFQIYNKDFSAYSKGRPNLHTL
YWKALFDERNLQDVVYKLNGEAELFYRKQSIPKKITHPAKEAIANKNKDNPKKESVFEYDLI
KDKRFTEDKFFFHCPITINFKSSGANKFNDEINLLLKEKANDVHILSIARGERHLAYYTLVD
GKGNIIKQDTFNIIGNDRMKTNYHDKLAAIEKDRDSARKDWKKINNIKEMKEGYLSQVVHEI
AKLVIEYNAIVVFEDLNFGFKRGRFKVEKQVYQKLEKMLIEKLNYLVFKDNEFDKTGGVLRA
YQLTAPFETFKKMGKQTGIIYYVPAGFTSKICPVTGFVNQLYPKYESVSKSQEFFSKFDKIC
YNLDKGYFEFSFDYKNFGDKAAKGKWTIASFGSRLINFRNSDKNHNWDTREVYPTKELEKLL
KDYSIEYGHGECIKAAICGESDKKFFAKLTSVLNTILQMRNSKTGTELDYLISPVADVNGNF
FDSRQAPKNMPQDADANGAYHIGLKGLMLLGRIKNNQEGKKLNLVIKNEEYFEFVQNRNN
Francisella novicida Cpf1 E1006A (D917, A1006, and D1255 are
bolded and underlined)
(SEQ ID NO: 109)
MSIYQEFVNKYSLSKTLRFELIPQGKTLENIKARGLILDDEKRAKDYKKAKQIIDKYHQFFI
EEILSSVCISEDLLQNYSDVYFKLKKSDDDNLQKDFKSAKDTIKKQISEYIKDSEKFKNLFN
QNLIDAKKGQESDLILWLKQSKDNGIELFKANSDITDIDEALEIIKSFKGWTTYFKGFHENR
KNVYSSNDIPTSIIYRIVDDNLPKFLENKAKYESLKDKAPEAINYEQIKKDLAEELTFDIDY
KTSEVNQRVFSLDEVFEIANFNNYLNQSGITKFNTIIGGKFVNGENTKRKGINEYINLYSQQ
INDKTLKKYKMSVLFKQILSDTESKSFVIDKLEDDSDVVTTMQSFYEQIAAFKTVEEKSIKE
TLSLLFDDLKAQKLDLSKIYFKNDKSLTDLSQQVFDDYSVIGTAVLEYITQQIAPKNLDNPS
KKEQELIAKKTEKAKYLSLETIKLALEEFNKHRDIDKQCRFEEILANFAAIPMIFDEIAQNK
DNLAQISIKYQNQGKKDLLQASAEDDVKAIKDLLDQTNNLLHKLKIFHISQSEDKANILDKD
EHFYLVFEECYFELANIVPLYNKIRNYITQKPYSDEKFKLNFENSTLANGWDKNKEPDNTAI
LFIKDDKYYLGVMNKKNNKIFDDKAIKENKGEGYKKIVYKLLPGANKMLPKVFFSAKSIKFY
NPSEDILRIRNHSTHTKNGSPQKGYEKFEFNIEDCRKFIDFYKQSISKHPEWKDFGFRFSDT
QRYNSIDEFYREVENQGYKLTFENISESYIDSVVNQGKLYLFQIYNKDFSAYSKGRPNLHTL
YWKALFDERNLQDVVYKLNGEAELFYRKQSIPKKITHPAKEAIANKNKDNPKKESVFEYDLI
KDKRFTEDKFFFHCPITINFKSSGANKFNDEINLLLKEKANDVHILSIDRGERHLAYYTLVD
GKGNIIKQDTFNIIGNDRMKTNYHDKLAAIEKDRDSARKDWKKINNIKEMKEGYLSQVVHEI
AKLVIEYNAIVVFADLNFGFKRGRFKVEKQVYQKLEKMLIEKLNYLVFKDNEFDKTGGVLRA
YQLTAPFETFKKMGKQTGIIYYVPAGFTSKICPVTGFVNQLYPKYESVSKSQEFFSKFDKIC
YNLDKGYFEFSFDYKNFGDKAAKGKWTIASFGSRLINFRNSDKNHNWDTREVYPTKELEKLL
KDYSIEYGHGECIKAAICGESDKKFFAKLTSVLNTILQMRNSKTGTELDYLISPVADVNGNF
FDSRQAPKNMPQDADANGAYHIGLKGLMLLGRIKNNQEGKKLNLVIKNEEYFEFVQNRNN
Francisella novicida Cpf1 D1255A (D917, E1006, and A1255 are
bolded and underlined)
(SEQ ID NO: 110)
MSIYQEFVNKYSLSKTLRFELIPQGKTLENIKARGLILDDEKRAKDYKKAKQIIDKYHQFFI
EEILSSVCISEDLLQNYSDVYFKLKKSDDDNLQKDFKSAKDTIKKQISEYIKDSEKFKNLFN
QNLIDAKKGQESDLILWLKQSKDNGIELFKANSDITDIDEALEIIKSFKGWTTYFKGFHENR
KNVYSSNDIPTSIIYRIVDDNLPKFLENKAKYESLKDKAPEAINYEQIKKDLAEELTFDIDY
KTSEVNQRVFSLDEVFEIANFNNYLNQSGITKFNTIIGGKFVNGENTKRKGINEYINLYSQQ
INDKTLKKYKMSVLFKQILSDTESKSFVIDKLEDDSDVVTTMQSFYEQIAAFKTVEEKSIKE
TLSLLFDDLKAQKLDLSKIYFKNDKSLTDLSQQVFDDYSVIGTAVLEYITQQIAPKNLDNPS
KKEQELIAKKTEKAKYLSLETIKLALEEFNKHRDIDKQCRFEEILANFAAIPMIFDEIAQNK
DNLAQISIKYQNQGKKDLLQASAEDDVKAIKDLLDQTNNLLHKLKIFHISQSEDKANILDKD
EHFYLVFEECYFELANIVPLYNKIRNYITQKPYSDEKFKLNFENSTLANGWDKNKEPDNTAI
LFIKDDKYYLGVMNKKNNKIFDDKAIKENKGEGYKKIVYKLLPGANKMLPKVFFSAKSIKFY
NPSEDILRIRNHSTHTKNGSPQKGYEKFEFNIEDCRKFIDFYKQSISKHPEWKDFGFRFSDT
QRYNSIDEFYREVENQGYKLTFENISESYIDSVVNQGKLYLFQIYNKDFSAYSKGRPNLHTL
YWKALFDERNLQDVVYKLNGEAELFYRKQSIPKKITHPAKEAIANKNKDNPKKESVFEYDLI
KDKRFTEDKFFFHCPITINFKSSGANKFNDEINLLLKEKANDVHILSIDRGERHLAYYTLVD
GKGNIIKQDTFNIIGNDRMKTNYHDKLAAIEKDRDSARKDWKKINNIKEMKEGYLSQVVHEI
AKLVIEYNAIVVFEDLNFGFKRGRFKVEKQVYQKLEKMLIEKLNYLVFKDNEFDKTGGVLRA
YQLTAPFETFKKMGKQTGIIYYVPAGFTSKICPVTGFVNQLYPKYESVSKSQEFFSKFDKIC
YNLDKGYFEFSFDYKNFGDKAAKGKWTIASFGSRLINFRNSDKNHNWDTREVYPTKELEKLL
KDYSIEYGHGECIKAAICGESDKKFFAKLTSVLNTILQMRNSKTGTELDYLISPVADVNGNF
FDSRQAPKNMPQDAAANGAYHIGLKGLMLLGRIKNNQEGKKLNLVIKNEEYFEFVQNRNN
Francisella novicida Cpf1 D917A/E1006A (A917, A1006, and D1255
are bolded and underlined)
(SEQ ID NO: 111)
MSIYQEFVNKYSLSKTLRFELIPQGKTLENIKARGLILDDEKRAKDYKKAKQIIDKYHQFFI
EEILSSVCISEDLLQNYSDVYFKLKKSDDDNLQKDFKSAKDTIKKQISEYIKDSEKFKNLFN
QNLIDAKKGQESDLILWLKQSKDNGIELFKANSDITDIDEALEIIKSFKGWTTYFKGFHENR
KNVYSSNDIPTSIIYRIVDDNLPKFLENKAKYESLKDKAPEAINYEQIKKDLAEELTFDIDY
KTSEVNQRVFSLDEVFEIANFNNYLNQSGITKFNTIIGGKFVNGENTKRKGINEYINLYSQQ
INDKTLKKYKMSVLFKQILSDTESKSFVIDKLEDDSDVVTTMQSFYEQIAAFKTVEEKSIKE
TLSLLFDDLKAQKLDLSKIYFKNDKSLTDLSQQVFDDYSVIGTAVLEYITQQIAPKNLDNPS
KKEQELIAKKTEKAKYLSLETIKLALEEFNKHRDIDKQCRFEEILANFAAIPMIFDEIAQNK
DNLAQISIKYQNQGKKDLLQASAEDDVKAIKDLLDQTNNLLHKLKIFHISQSEDKANILDKD
EHFYLVFEECYFELANIVPLYNKIRNYITQKPYSDEKFKLNFENSTLANGWDKNKEPDNTAI
LFIKDDKYYLGVMNKKNNKIFDDKAIKENKGEGYKKIVYKLLPGANKMLPKVFFSAKSIKFY
NPSEDILRIRNHSTHTKNGSPQKGYEKFEFNIEDCRKFIDFYKQSISKHPEWKDFGFRFSDT
QRYNSIDEFYREVENQGYKLTFENISESYIDSVVNQGKLYLFQIYNKDFSAYSKGRPNLHTL
YWKALFDERNLQDVVYKLNGEAELFYRKQSIPKKITHPAKEAIANKNKDNPKKESVFEYDLI
KDKRFTEDKFFFHCPITINFKSSGANKFNDEINLLLKEKANDVHILSIARGERHLAYYTLVD
GKGNIIKQDTFNIIGNDRMKTNYHDKLAAIEKDRDSARKDWKKINNIKEMKEGYLSQVVHEI
AKLVIEYNAIVVFADLNFGFKRGRFKVEKQVYQKLEKMLIEKLNYLVFKDNEFDKTGGVLRA
YQLTAPFETFKKMGKQTGIIYYVPAGFTSKICPVTGFVNQLYPKYESVSKSQEFFSKFDKIC
YNLDKGYFEFSFDYKNFGDKAAKGKWTIASFGSRLINFRNSDKNHNWDTREVYPTKELEKLL
KDYSIEYGHGECIKAAICGESDKKFFAKLTSVLNTILQMRNSKTGTELDYLISPVADVNGNF
FDSRQAPKNMPQDADANGAYHIGLKGLMLLGRIKNNQEGKKLNLVIKNEEYFEFVQNRNN
Francisella novicida Cpf1 D917A/D1255A (A917, E1006, and A1255
are bolded and underlined)
(SEQ ID NO: 112)
MSIYQEFVNKYSLSKTLRFELIPQGKTLENIKARGLILDDEKRAKDYKKAKQIIDKYHQFFI
EEILSSVCISEDLLQNYSDVYFKLKKSDDDNLQKDFKSAKDTIKKQISEYIKDSEKFKNLFN
QNLIDAKKGQESDLILWLKQSKDNGIELFKANSDITDIDEALEIIKSFKGWTTYFKGFHENR
KNVYSSNDIPTSIIYRIVDDNLPKFLENKAKYESLKDKAPEAINYEQIKKDLAEELTFDIDY
KTSEVNQRVFSLDEVFEIANFNNYLNQSGITKFNTIIGGKFVNGENTKRKGINEYINLYSQQ
INDKTLKKYKMSVLFKQILSDTESKSFVIDKLEDDSDVVTTMQSFYEQIAAFKTVEEKSIKE
TLSLLFDDLKAQKLDLSKIYFKNDKSLTDLSQQVFDDYSVIGTAVLEYITQQIAPKNLDNPS
KKEQELIAKKTEKAKYLSLETIKLALEEFNKHRDIDKQCRFEEILANFAAIPMIFDEIAQNK
DNLAQISIKYQNQGKKDLLQASAEDDVKAIKDLLDQTNNLLHKLKIFHISQSEDKANILDKD
EHFYLVFEECYFELANIVPLYNKIRNYITQKPYSDEKFKLNFENSTLANGWDKNKEPDNTAI
LFIKDDKYYLGVMNKKNNKIFDDKAIKENKGEGYKKIVYKLLPGANKMLPKVFFSAKSIKFY
NPSEDILRIRNHSTHTKNGSPQKGYEKFEFNIEDCRKFIDFYKQSISKHPEWKDFGFRFSDT
QRYNSIDEFYREVENQGYKLTFENISESYIDSVVNQGKLYLFQIYNKDFSAYSKGRPNLHTL
YWKALFDERNLQDVVYKLNGEAELFYRKQSIPKKITHPAKEAIANKNKDNPKKESVFEYDLI
KDKRFTEDKFFFHCPITINFKSSGANKFNDEINLLLKEKANDVHILSIARGERHLAYYTLVD
GKGNIIKQDTFNIIGNDRMKTNYHDKLAAIEKDRDSARKDWKKINNIKEMKEGYLSQVVHEI
AKLVIEYNAIVVFEDLNFGFKRGRFKVEKQVYQKLEKMLIEKLNYLVFKDNEFDKTGGVLRA
YQLTAPFETFKKMGKQTGIIYYVPAGFTSKICPVTGFVNQLYPKYESVSKSQEFFSKFDKIC
YNLDKGYFEFSFDYKNFGDKAAKGKWTIASFGSRLINFRNSDKNHNWDTREVYPTKELEKLL
KDYSIEYGHGECIKAAICGESDKKFFAKLTSVLNTILQMRNSKTGTELDYLISPVADVNGNF
FDSRQAPKNMPQDAAANGAYHIGLKGLMLLGRIKNNQEGKKLNLVIKNEEYFEFVQNRNN
Francisella novicida Cpf1 E1006A/D1255A (D917, A1006, and
A1255 are bolded and underlined)
(SEQ ID NO: 113)
MSIYQEFVNKYSLSKTLRFELIPQGKTLENIKARGLILDDEKRAKDYKKAKQIIDKYHQFFI
EEILSSVCISEDLLQNYSDVYFKLKKSDDDNLQKDFKSAKDTIKKQISEYIKDSEKFKNLFN
QNLIDAKKGQESDLILWLKQSKDNGIELFKANSDITDIDEALEIIKSFKGWTTYFKGFHENR
KNVYSSNDIPTSIIYRIVDDNLPKFLENKAKYESLKDKAPEAINYEQIKKDLAEELTFDIDY
KTSEVNQRVFSLDEVFEIANFNNYLNQSGITKFNTIIGGKFVNGENTKRKGINEYINLYSQQ
INDKTLKKYKMSVLFKQILSDTESKSFVIDKLEDDSDVVTTMQSFYEQIAAFKTVEEKSIKE
TLSLLFDDLKAQKLDLSKIYFKNDKSLTDLSQQVFDDYSVIGTAVLEYITQQIAPKNLDNPS
KKEQELIAKKTEKAKYLSLETIKLALEEFNKHRDIDKQCRFEEILANFAAIPMIFDEIAQNK
DNLAQISIKYQNQGKKDLLQASAEDDVKAIKDLLDQTNNLLHKLKIFHISQSEDKANILDKD
EHFYLVFEECYFELANIVPLYNKIRNYITQKPYSDEKFKLNFENSTLANGWDKNKEPDNTAI
LFIKDDKYYLGVMNKKNNKIFDDKAIKENKGEGYKKIVYKLLPGANKMLPKVFFSAKSIKFY
NPSEDILRIRNHSTHTKNGSPQKGYEKFEFNIEDCRKFIDFYKQSISKHPEWKDFGFRFSDT
QRYNSIDEFYREVENQGYKLTFENISESYIDSVVNQGKLYLFQIYNKDFSAYSKGRPNLHTL
YWKALFDERNLQDVVYKLNGEAELFYRKQSIPKKITHPAKEAIANKNKDNPKKESVFEYDLI
KDKRFTEDKFFFHCPITINFKSSGANKFNDEINLLLKEKANDVHILSIDRGERHLAYYTLVD
GKGNIIKQDTFNIIGNDRMKTNYHDKLAAIEKDRDSARKDWKKINNIKEMKEGYLSQVVHEI
AKLVIEYNAIVVFADLNFGFKRGRFKVEKQVYQKLEKMLIEKLNYLVFKDNEFDKTGGVLRA
YQLTAPFETFKKMGKQTGIIYYVPAGFTSKICPVTGFVNQLYPKYESVSKSQEFFSKFDKIC
YNLDKGYFEFSFDYKNFGDKAAKGKWTIASFGSRLINFRNSDKNHNWDTREVYPTKELEKLL
KDYSIEYGHGECIKAAICGESDKKFFAKLTSVLNTILQMRNSKTGTELDYLISPVADVNGNF
FDSRQAPKNMPQDAAANGAYHIGLKGLMLLGRIKNNQEGKKLNLVIKNEEYFEFVQNRNN
Francisella novicida Cpf1 D917A/E1006A/D1255A (A917, A1006,
and A1255 are bolded and underlined)
(SEQ ID NO: 114)
MSIYQEFVNKYSLSKTLRFELIPQGKTLENIKARGLILDDEKRAKDYKKAKQIIDKYHQFFI
EEILSSVCISEDLLQNYSDVYFKLKKSDDDNLQKDFKSAKDTIKKQISEYIKDSEKFKNLFN
QNLIDAKKGQESDLILWLKQSKDNGIELFKANSDITDIDEALEIIKSFKGWTTYFKGFHENR
KNVYSSNDIPTSIIYRIVDDNLPKFLENKAKYESLKDKAPEAINYEQIKKDLAEELTFDIDY
KTSEVNQRVFSLDEVFEIANFNNYLNQSGITKFNTIIGGKFVNGENTKRKGINEYINLYSQQ
INDKTLKKYKMSVLFKQILSDTESKSFVIDKLEDDSDVVTTMQSFYEQIAAFKTVEEKSIKE
TLSLLFDDLKAQKLDLSKIYFKNDKSLTDLSQQVFDDYSVIGTAVLEYITQQIAPKNLDNPS
KKEQELIAKKTEKAKYLSLETIKLALEEFNKHRDIDKQCRFEEILANFAAIPMIFDEIAQNK
DNLAQISIKYQNQGKKDLLQASAEDDVKAIKDLLDQTNNLLHKLKIFHISQSEDKANILDKD
EHFYLVFEECYFELANIVPLYNKIRNYITQKPYSDEKFKLNFENSTLANGWDKNKEPDNTAI
LFIKDDKYYLGVMNKKNNKIFDDKAIKENKGEGYKKIVYKLLPGANKMLPKVFFSAKSIKFY
NPSEDILRIRNHSTHTKNGSPQKGYEKFEFNIEDCRKFIDFYKQSISKHPEWKDFGFRFSDT
QRYNSIDEFYREVENQGYKLTFENISESYIDSVVNQGKLYLFQIYNKDFSAYSKGRPNLHTL
YWKALFDERNLQDVVYKLNGEAELFYRKQSIPKKITHPAKEAIANKNKDNPKKESVFEYDLI
KDKRFTEDKFFFHCPITINFKSSGANKFNDEINLLLKEKANDVHILSIARGERHLAYYTLVD
GKGNIIKQDTFNIIGNDRMKTNYHDKLAAIEKDRDSARKDWKKINNIKEMKEGYLSQVVHEI
AKLVIEYNAIVVFADLNFGFKRGRFKVEKQVYQKLEKMLIEKLNYLVFKDNEFDKTGGVLRA
YQLTAPFETFKKMGKQTGIIYYVPAGFTSKICPVTGFVNQLYPKYESVSKSQEFFSKFDKIC
YNLDKGYFEFSFDYKNFGDKAAKGKWTIASFGSRLINFRNSDKNHNWDTREVYPTKELEKLL
KDYSIEYGHGECIKAAICGESDKKFFAKLTSVLNTILQMRNSKTGTELDYLISPVADVNGNF
FDSRQAPKNMPQDAAANGAYHIGLKGLMLLGRIKNNQEGKKLNLVIKNEEYFEFVQNRNN

[0397] In some embodiments, one of the Cas9 domains present in the fusion protein may be replaced with a guide nucleotide sequence-programmable DNA-binding protein domain that has no requirements for a PAM sequence.

[0398] In some embodiments, the Cas9 domain is a Cas9 domain from Staphylococcus aureus (SaCas9). In some embodiments, the SaCas9 domain is a nuclease active SaCas9, a nuclease inactive SaCas9 (SaCas9d), or a SaCas9 nickase (SaCas9n). In some embodiments, the SaCas9 comprises a N579A mutation, or a corresponding mutation in any of the amino acid sequences provided herein.

[0399] In some embodiments, the SaCas9 domain, the SaCas9d domain, or the SaCas9n domain can bind to a nucleic acid sequence having a non-canonical PAM. In some embodiments, the SaCas9 domain, the SaCas9d domain, or the SaCas9n domain can bind to a nucleic acid sequence having a NNGRRT or a NNGRRT PAM sequence. In some embodiments, the SaCas9 domain comprises one or more of a E781X, a N967X, and a R1014X mutation, or a corresponding mutation in any of the amino acid sequences provided herein, wherein X is any amino acid. In some embodiments, the SaCas9 domain comprises one or more of a E781K, a N967K, and a R1014H mutation, or one or more corresponding mutation in any of the amino acid sequences provided herein. In some embodiments, the SaCas9 domain comprises a E781K, a N967K, or a R1014H mutation, or corresponding mutations in any of the amino acid sequences provided herein.

Exemplary SaCas9 sequence
(SEQ ID NO: 115)
KRNYILGLDIGITSVGYGIIDYETRDVIDAGVRLFKEANVENNEGRRSKR
GARRLKRRRRHRIQRVKKLLFDYNLLTDHSELSGINPYEARVKGLSQKLS
EEEFSAALLHLAKRRGVHNVNEVEEDTGNELSTKEQISRNSKALEEKYVA
ELQLERLKKDGEVRGSINRFKTSDYVKEAKQLLKVQKAYHQLDQSFIDTY
IDLLETRRTYYEGPGEGSPFGWKDIKEWYEMLMGHCTYFPEELRSVKYAY
NADLYNALNDLNNLVITRDENEKLEYYEKFQIIENVFKQKKKPTLKQIAK
EILVNEEDIKGYRVTSTGKPEFTNLKVYHDIKDITARKEIIENAELLDQI
AKILTIYQSSEDIQEELTNLNSELTQEEIEQISNLKGYTGTHNLSLKAIN
LILDELWHTNDNQIAIFNRLKLVPKKVDLSQQKEIPTTLVDDFILSPVVK
RSFIQSIKVINAIIKKYGLPNDIIIELAREKNSKDAQKMINEMQKRNRQT
NERIEEIIRTTGKENAKYLIEKIKLHDMQEGKCLYSLEAIPLEDLLNNPF
NYEVDHIIPRSVSFDNSFNNKVLVKQEENSKKGNRTPFQYLSSSDSKISY
ETFKKHILNLAKGKGRISKTKKEYLLEERDINRFSVQKDFINRNLVDTRY
ATRGLMNLLRSYFRVNNLDVKVKSINGGFTSFLRRKWKFKKERNKGYKHH
AEDALIIANADFIFKEWKKLDKAKKVMENQMFEEKQAESMPEIETEQEYK
EIFITPHQIKHIKDFKDYKYSHRVDKKPNRELINDTLYSTRKDDKGNTLI
VNNLNGLYDKDNDKLKKLINKSPEKLLMYHHDPQTYQKLKLIMEQYGDEK
NPLYKYYEETGNYLTKYSKKDNGPVIKKIKYYGNKLNAHLDITDDYPNSR
NKVVKLSLKPYRFDVYLDNGVYKFVTVKNLDVIKKENYYEVNSKCYEEAK
KLKKISNQAEFIASFYNNDLIKINGELYRVIGVNNDLLNRIEVNMIDITY
REYLENMNDKRPPRIIKTIASKTQSIKKYSTDILGNLYEVKSKKHPQIIK
KG

[0400] Residue N579 above, which is underlined and in bold, may be mutated (e.g., to a A579) to yield a SaCas9 nickase.

Exemplary SaCas9n sequence
(SEQ ID NO: 116)
KRNYILGLDIGITSVGYGIIDYETRDVIDAGVRLFKEANVENNEGRRSKR
GARRLKRRRRHRIQRVKKLLFDYNLLTDHSELSGINPYEARVKGLSQKLS
EEEFSAALLHLAKRRGVHNVNEVEEDTGNELSTKEQISRNSKALEEKYVA
ELQLERLKKDGEVRGSINRFKTSDYVKEAKQLLKVQKAYHQLDQSFIDTY
IDLLETRRTYYEGPGEGSPFGWKDIKEWYEMLMGHCTYFPEELRSVKYAY
NADLYNALNDLNNLVITRDENEKLEYYEKFQIIENVFKQKKKPTLKQIAK
EILVNEEDIKGYRVTSTGKPEFTNLKVYHDIKDITARKEIIENAELLDQI
AKILTIYQSSEDIQEELTNLNSELTQEEIEQISNLKGYTGTHNLSLKAIN
LILDELWHTNDNQIAIFNRLKLVPKKVDLSQQKEIPTTLVDDFILSPVVK
RSFIQSIKVINAIIKKYGLPNDIIIELAREKNSKDAQKMINEMQKRNRQT
NERIEEIIRTTGKENAKYLIEKIKLHDMQEGKCLYSLEAIPLEDLLNNPF
NYEVDHIIPRSVSFDNSFNNKVLVKQEEASKKGNRTPFQYLSSSDSKISY
ETFKKHILNLAKGKGRISKTKKEYLLEERDINRFSVQKDFINRNLVDTRY
ATRGLMNLLRSYFRVNNLDVKVKSINGGFTSFLRRKWKFKKERNKGYKHH
AEDALIIANADFIFKEWKKLDKAKKVMENQMFEEKQAESMPEIETEQEYK
EIFITPHQIKHIKDFKDYKYSHRVDKKPNRELINDTLYSTRKDDKGNTLI
VNNLNGLYDKDNDKLKKLINKSPEKLLMYHHDPQTYQKLKLIMEQYGDEK
NPLYKYYEETGNYLTKYSKKDNGPVIKKIKYYGNKLNAHLDITDDYPNSR
NKVVKLSLKPYRFDVYLDNGVYKFVTVKNLDVIKKENYYEVNSKCYEEAK
KLKKISNQAEFIASFYNNDLIKINGELYRVIGVNNDLLNRIEVNMIDITY
REYLENMNDKRPPRIIKTIASKTQSIKKYSTDILGNLYEVKSKKHPQIIK
KG

[0401] Residue A579 above, which can be mutated from N579 to yield a SaCas9 nickase, is underlined and in bold.

Exemplary SaKKH Cas9
(SEQ ID NO: 117)
KRNYILGLDIGITSVGYGIIDYETRDVIDAGVRLFKEANVENNEGRRSKR
GARRLKRRRRHRIQRVKKLLFDYNLLTDHSELSGINPYEARVKGLSQKLS
EEEFSAALLHLAKRRGVHNVNEVEEDTGNELSTKEQISRNSKALEEKYVA
ELQLERLKKDGEVRGSINRFKTSDYVKEAKQLLKVQKAYHQLDQSFIDTY
IDLLETRRTYYEGPGEGSPFGWKDIKEWYEMLMGHCTYFPEELRSVKYAY
NADLYNALNDLNNLVITRDENEKLEYYEKFQIIENVFKQKKKPTLKQIAK
EILVNEEDIKGYRVTSTGKPEFTNLKVYHDIKDITARKEIIENAELLDQI
AKILTIYQSSEDIQEELTNLNSELTQEEIEQISNLKGYTGTHNLSLKAIN
LILDELWHTNDNQIAIFNRLKLVPKKVDLSQQKEIPTTLVDDFILSPVVK
RSFIQSIKVINAIIKKYGLPNDIIIELAREKNSKDAQKMINEMQKRNRQT
NERIEEIIRTTGKENAKYLIEKIKLHDMQEGKCLYSLEAIPLEDLLNNPF
NYEVDHIIPRSVSFDNSFNNKVLVKQEEASKKGNRTPFQYLSSSDSKISY
ETFKKHILNLAKGKGRISKTKKEYLLEERDINRFSVQKDFINRNLVDTRY
ATRGLMNLLRSYFRVNNLDVKVKSINGGFTSFLRRKWKFKKERNKGYKHH
AEDALIIANADFIFKEWKKLDKAKKVMENQMFEEKQAESMPEIETEQEYK
EIFITPHQIKHIKDFKDYKYSHRVDKKPNRKLINDTLYSTRKDDKGNTLI
VNNLNGLYDKDNDKLKKLINKSPEKLLMYHHDPQTYQKLKLIMEQYGDEK
NPLYKYYEETGNYLTKYSKKDNGPVIKKIKYYGNKLNAHLDITDDYPNSR
NKVVKLSLKPYRFDVYLDNGVYKFVTVKNLDVIKKENYYEVNSKCYEEAK
KLKKISNQAEFIASFYKNDLIKINGELYRVIGVNNDLLNRIEVNMIDITY
REYLENMNDKRPPHIIKTIASKTQSIKKYSTDILGNLYEVKSKKHPQIIK
KG.

[0402] Residue A579 above, which can be mutated from N579 to yield a SaCas9 nickase, is underlined and in bold. Residues K781, K967, and H1014 above, which can be mutated from E781, N967, and R1014 to yield a SaKKH Cas9 are underlined and in italics.

[0403] In some embodiments, the napDNAbp is a circular permutant. In the following sequences, the plain text denotes an adenosine deaminase sequence, bold sequence indicates sequence derived from Cas9, the italics sequence denotes a linker sequence, and the underlined sequence denotes a bipartite nuclear localization sequence.

CP5 (with MSP“NGC” PID and “D10A” nickase):
(SEQ ID NO: 38)
EIGKATAKYFFYSNIMNFFKTEITLANGEIRKRPLIETNGETGEIVWDKG
RDFATVRKVLSMPQVNIVKKTEVQTGGFSKESILPKRNSDKLIARKKDWD
PKKYGGFMQPTVAYSVLVVAKVEKGKSKKLKSVKELLGITIMERSSFEKN
PIDFLEAKGYKEVKKDLIIKLPKYSLFELENGRKRMLASAKFLQKGNELA
LPSKYVNFLYLASHYEKLKGSPEDNEQKQLFVEQHKHYLDEIIEQISEFS
KRVILADANLDKVLSAYNKHRDKPIREQAENIIHLFTLTNLGAPRAFKYF
DTTIARKEYRSTKEVLDATLIHQSITGLYETRIDLSQLGGDGGSGGSGGS
GGSGGSGGSGGMDKKYSIGLAIGTNSVGWAVITDEYKVPSKKFKVLGNTD
RHSIKKNLIGALLFDSGETAEATRLKRTARRRYTRRKNRICYLQEIFSNE
MAKVDDSFFHRLEESFLVEEDKKHERHPIFGNIVDEVAYHEKYPTIYHLR
KKLVDSTDKADLRLIYLALAHMIKFRGHFLIEGDLNPDNSDVDKLFIQLV
QTYNQLFEENPINASGVDAKAILSARLSKSRRLENLIAQLPGEKKNGLFG
NLIALSLGLTPNFKSNFDLAEDAKLQLSKDTYDDDLDNLLAQIGDQYADL
FLAAKNLSDAILLSDILRVNTEITKAPLSASMIKRYDEHHQDLTLLKALV
RQQLPEKYKEIFFDQSKNGYAGYIDGGASQEEFYKFIKPILEKMDGTEEL
LVKLNREDLLRKQRTFDNGSIPHQIHLGELHAILRRQEDFYPFLKDNREK
IEKILTFRIPYYVGPLARGNSRFAWMTRKSEETITPWNFEEVVDKGASAQ
SFIERMTNFDKNLPNEKVLPKHSLLYEYFTVYNELTKVKYVTEGMRKPAF
LSGEQKKAIVDLLFKTNRKVTVKQLKEDYFKKIECFDSVEISGVEDRFNA
SLGTYHDLLKIIKDKDFLDNEENEDILEDIVLTLTLFEDREMIEERLKTY
AHLFDDKVMKQLKRRRYTGWGRLSRKLINGIRDKQSGKTILDFLKSDGFA
NRNFMQLIHDDSLTFKEDIQKAQVSGQGDSLHEHIANLAGSPAIKKGILQ
TVKVVDELVKVMGRHKPENIVIEMARENQTTQKGQKNSRERMKRIEEGIK
ELGSQILKEHPVENTQLQNEKLYLYYLQNGRDMYVDQELDINRLSDYDVD
HIVPQSFLKDDSIDNKVLTRSDKNRGKSDNVPSEEVVKKMKNYWRQLLNA
KLITQRKFDNLTKAERGGLSELDKAGFIKRQLVETRQITKHVAQILDSRM
NTKYDENDKLIREVKVITLKSKLVSDFRKDFQFYKVREINNYHHAHDAYL
NAVVGTALIKKYPKLESEFVYGDYKVYDVRKMIAKSEQEGADKRTADGSE
FESPKKKRKV*

[0404] In some embodiments, the nucleic acid programmable DNA binding protein (napDNAbp) is a single effector of a microbial CRISPR-Cas system. Single effectors of microbial CRISPR-Cas systems include, without limitation, Cas9, Cpf1, Cas12b/C2c1, and Cas12c/C2c3. Typically, microbial CRISPR-Cas systems are divided into Class 1 and Class 2 systems. Class 1 systems have multisubunit effector complexes, while Class 2 systems have a single protein effector. For example, Cas9 and Cpf1 are Class 2 effectors. In addition to Cas9 and Cpf1, three distinct Class 2 CRISPR-Cas systems (Cas12b/C2c1, and Cas12c/C2c3) have been described by Shmakov et al., “Discovery and Functional Characterization of Diverse Class 2 CRISPR Cas Systems”, Mol. Cell, 2015 Nov. 5; 60(3): 385-397, the entire contents of which is hereby incorporated by reference. Effectors of two of the systems, Cas12b/C2c1, and Cas12c/C2c3, contain RuvC-like endonuclease domains related to Cpf1. A third system, contains an effector with two predicated HEPN RNase domains. Production of mature CRISPR RNA is tracrRNA-independent, unlike production of CRISPR RNA by Cas12b/C2c1. Cas12b/C2c1 depends on both CRISPR RNA and tracrRNA for DNA cleavage.

[0405] The crystal structure of Alicyclobaccillus acidoterrastris Cas12b/C2c1 (AacC2c1) has been reported in complex with a chimeric single-molecule guide RNA (sgRNA). See e.g., Liu et al., “C2c1-sgRNA Complex Structure Reveals RNA-Guided DNA Cleavage Mechanism”, Mol. Cell, 2017 Jan. 19; 65(2):310-322, the entire contents of which are hereby incorporated by reference. The crystal structure has also been reported in Alicyclobacillus acidoterrestris C2c1 bound to target DNAs as ternary complexes. See e.g., Yang et al., “PAM-dependent Target DNA Recognition and Cleavage by C2C1 CRISPR-Cas endonuclease”, Cell, 2016 Dec. 15; 167(7):1814-1828, the entire contents of which are hereby incorporated by reference. Catalytically competent conformations of AacC2c1, both with target and non-target DNA strands, have been captured independently positioned within a single RuvC catalytic pocket, with Cas12b/C2c1-mediated cleavage resulting in a staggered seven-nucleotide break of target DNA. Structural comparisons between Cas12b/C2c1 ternary complexes and previously identified Cas9 and Cpf1 counterparts demonstrate the diversity of mechanisms used by CRISPR-Cas9 systems.

[0406] In some embodiments, the nucleic acid programmable DNA binding protein (napDNAbp) of any of the fusion proteins provided herein may be a Cas12b/C2c1, or a Cas12c/C2c3 protein. In some embodiments, the napDNAbp is a Cas12b/C2c1 protein. In some embodiments, the napDNAbp is a Cas12c/C2c3 protein. In some embodiments, the napDNAbp comprises an amino acid sequence that is at least 85%, at least 90%, at least 91%, at least 92%, at least 93%, at least 94%, at least 95%, at least 96%, at least 97%, at least 98%, at least 99%, or at ease 99.5% identical to a naturally-occurring Cas12b/C2c1 or Cas12c/C2c3 protein. In some embodiments, the napDNAbp is a naturally-occurring Cas12b/C2c1 or Cas12c/C2c3 protein. In some embodiments, the napDNAbp comprises an amino acid sequence that is at least 85%, at least 90%, at least 91%, at least 92%, at least 93%, at least 94%, at least 95%, at least 96%, at least 97%, at least 98%, at least 99%, or at ease 99.5% identical to any one of the napDNAbp sequences provided herein. It should be appreciated that Cas12b/C2c1 or Cas12c/C2c3 from other bacterial species may also be used in accordance with the present disclosure.

ACas12b/C2c1 ((uniprot.org/uniprot/T0D7A2#2) sp|T0D7A2|C2C1_ALIAG
CRISPR-associated endonuclease C2c1 OS = Alicyclobacillus acido-terrestris (strain ATCC
49025 / DSM 3922/ CIP106132 /NCIMB 13137/GD3B) GN = c2c1 PE = 1 SV = 1) amino acid
sequence is as follows:
(SEQ ID NO: 50)
MAVKSIKVKLRLDDMPEIRAGLWKLHKEVNAGVRYYTEWLSLLRQENLYRRSPNGDGEQECD
KTAEECKAELLERLRARQVENGHRGPAGSDDELLQLARQLYELLVPQAIGAKGDAQQIARKF
LSPLADKDAVGGLGIAKAGNKPRWVRMREAGEPGWEEEKEKAETRKSADRTADVLRALADFG
LKPLMRVYTDSEMSSVEWKPLRKGQAVRTWDRDMFQQAIERMMSWESWNQRVGQEYAKLVEQ
KNRFEQKNFVGQEHLVHLVNQLQQDMKEASPGLESKEQTAHYVTGRALRGSDKVFEKWGKLA
PDAPFDLYDAEIKNVQRRNTRRFGSHDLFAKLAEPEYQALWREDASFLTRYAVYNSILRKLN
HAKMFATFTLPDATAHPIWTRFDKLGGNLHQYTFLFNEFGERRHAIRFHKLLKVENGVAREV
DDVTVPISMSEQLDNLLPRDPNEPIALYFRDYGAEQHFTGEFGGAKIQCRRDQLAHMHRRRG
ARDVYLNVSVRVQSQSEARGERRPPYAAVFRLVGDNHRAFVHFDKLSDYLAEHPDDGKLGSE
GLLSGLRVMSVDLGLRTSASISVFRVARKDELKPNSKGRVPFFFPIKGNDNLVAVHERSQLL
KLPGETESKDLRAIREERQRTLRQLRTQLAYLRLLVRCGSEDVGRRERSWAKLIEQPVDAAN
HMTPDWREAFENELQKLKSLHGICSDKEWMDAVYESVRRVWRHMGKQVRDWRKDVRSGERPK
IRGYAKDVVGGNSIEQIEYLERQYKFLKSWSFFGKVSGQVIRAEKGSRFAITLREHIDHAKE
DRLKKLADRIIMEALGYVYALDERGKGKWVAKYPPCQLILLEELSEYQFNNDRPPSENNQLM
QWSHRGVFQELINQAQVHDLLVGTMYAAFSSRFDARTGAPGIRCRRVPARCTQEHNPEPFPW
WLNKFVVEHTLDACPLRADDLIPTGEGEIFVSPFSAEEGDFHQIHADLNAAQNLQQRLWSDF
DISQIRLRCDWGEVDGELVLIPRLTGKRTADSYSNKVFYTNTGVTYYERERGKKRRKVFAQE
KLSEEEAELLVEADEAREKSVVLMRDPSGIINRGNWTRQKEFWSMV NQRIEGYLVKQIRSR
VPLQDSACENTGDI.
AacCas12b (Alicyclobacillus acidiphilus) - WP_067623834
(SEQ ID NO: 118)
MAVKSMKVKLRLDNMPEIRAGLWKLHTEVNAGVRYYTEWLSLLRQENLYRRSPNGDGEQECY
KTAEECKAELLERLRARQVENGHCGPAGSDDELLQLARQLYELLVPQAIGAKGDAQQIARKF
LSPLADKDAVGGLGIAKAGNKPRWVRMREAGEPGWEEEKAKAEARKSTDRTADVLRALADFG
LKPLMRVYTDSDMSSVQWKPLRKGQAVRTWDRDMFQQAIERMMSWESWNQRVGEAYAKLVEQ
KSRFEQKNFVGQEHLVQLVNQLQQDMKEASHGLESKEQTAHYLTGRALRGSDKVFEKWEKLD
PDAPFDLYDTEIKNVQRRNTRRFGSHDLFAKLAEPKYQALWREDASFLTRYAVYNSIVRKLN
HAKMFATFTLPDATAHPIWTRFDKLGGNLHQYTFLFNEFGEGRHAIRFQKLLTVEDGVAKEV
DDVTVPISMSAQLDDLLPRDPHELVALYFQDYGAEQHLAGEFGGAKIQYRRDQLNHLHARRG
ARDVYLNLSVRVQSQSEARGERRPPYAAVFRLVGDNHRAFVHFDKLSDYLAEHPDDGKLGSE
GLLSGLRVMSVDLGLRTSASISVFRVARKDELKPNSEGRVPFCFPIEGNENLVAVHERSQLL
KLPGETESKDLRAIREERQRTLRQLRTQLAYLRLLVRCGSEDVGRRERSWAKLIEQPMDANQ
MTPDWREAFEDELQKLKSLYGICGDREWTEAVYESVRRVWRHMGKQVRDWRKDVRSGERPKI
RGYQKDVVGGNSIEQIEYLERQYKFLKSWSFFGKVSGQVIRAEKGSRFAITLREHIDHAKED
RLKKLADRIIMEALGYVYALDDERGKGKWVAKYPPCQLILLEELSEYQFNNDRPPSENNQLM
QWSHRGVFQELLNQAQVHDLLVGTMYAAFSSRFDARTGAPGIRCRRVPARCAREQNPEPFPW
WLNKFVAEHKLDGCPLRADDLIPTGEGEFFVSPFSAEEGDFHQIHADLNAAQNLQRRLWSDF
DISQIRLRCDWGEVDGEPVLIPRTTGKRTADSYGNKVFYTKTGVTYYERERGKKRRKVFAQE
ELSEEEAELLVEADEAREKSVVLMRDPSGIINRGDWTRQKEFWSMVNQRIEGYLVKQIRSRV
RLQESACENTGDI
BhCas12b (Bacillus hisashii) NCBI Reference Sequence: WP_095142515
(SEQ ID NO: 55)
MAPKKKRKVGIHGVPAAATRSFILKIEPNEEVKKGLWKTHEVLNHGIAYYMNILKLIRQEAI
YEHHEQDPKNPKKVSKAEIQAELWDFVLKMQKCNSFTHEVDKDEVFNILRELYEELVPSSVE
KKGEANQLSNKFLYPLVDPNSQSGKGTASSGRKPRWYNLKIAGDPSWEEEKKKWEEDKKKDP
LAKILGKLAEYGLIPLFIPYTDSNEPIVKEIKWMEKSRNQSVRRLDKDMFIQALERFLSWES
WNLKVKEEYEKVEKEYKTLEERIKEDIQALKALEQYEKERQEQLLRDTLNTNEYRLSKRGLR
GWREIIQKWLKMDENEPSEKYLEVFKDYQRKHPREAGDYSVYEFLSKKENHFIWRNHPEYPY
LYATFCEIDKKKKDAKQQATETLADPINHPLWVRFEERSGSNLNKYRILTEQLHTEKLKKKL
TVQLDRLIYPTESGGWEEKGKVDIVLLPSRQFYNQIFLDIEEKGKHAFTYKDESIKFPLKGT
LGGARVQFDRDHLRRYPHKVESGNVGRIYFNMTVNIEPTESPVSKSLKIHRDDFPKVVNFKP
KELTEWIKDSKGKKLKSGIESLEIGLRVMSIDLGQRQAAAASIFEVVDQKPDIEGKLFFPIK
GTELYAVHRASFNIKLPGETLVKSREVLRKAREDNLKLMNQKLNFLRNVLHFQQFEDITERE
KRVTKWISRQENSDVPLVYQDELIQIRELMYKPYKDWVAFLKQLHKRLEVEIGKEVKHWRKS
LSDGRKGLYGISLKNIDEIDRTRKFLLRWSLRPTEPGEVRRLEPGQRFAIDQLNHLNALKED
RLKKMANTIIMHALGYCYDVRKKKWQAKNPACQIILFEDLSNYNPYEERSRFENSKLMKWSR
REIPRQVALQGEIYGLQVGEVGAQFSSRFHAKTGSPGIRCSVVTKEKLQDNRFFKNLQREGR
LTLDKIAVLKEGDLYPDKGGEKFISLSKDRKCVTTHADINAAQNLQKRFWTRTHGFYKVYCK
AYQVDGQTVYIPESKDQKQKIIEEFGEGYFILKDGVYEWVNAGKLKIKKGSSKQSSSELVDS
DILKDSFDLASELKGEKLMLYRDPSGNVFPSDKWMAAGVFFGKLERILISKLTNQYSISTIE
DDSSKQSMKRPAATKKAGQAKKKK
BvCas12b V4 (S893R/K846R/E837G changes rel. to wild type) is expressed as
follows: 5′ mRNA Cap-5′UTR-bhCas12b-STOP sequence-3′UTR - 120polyA tail
5′UTR (“120polyA tail” disclosed as SEQ ID NO: 425):
(SEQ ID NO: 119)
GGGAAATAAGAGAGAAAAGAAGAGTAAGAAGAAATATAAGAGCCACC
3′ UTR (TriLink standard UTR)
(SEQ ID NO: 120)
GCTGGAGCCTCGGTGGCCATGCTTCTTGCCCCTTGGGCCTCCCCCCAGCCCCTCCTCCCCTT
CCTGCACCCGTACCCCCGTGGTCTTTGAATAAAGTCTGA
Nucleic acid sequence of bhCas12b (V4)
(SEQ ID NO: 121)
ATGGCCCCAAAGAAGAAGCGGAAGGTCGGTATCCACGGAGTCCCAGCAGCCGCCACCAGATC
CTTCATCCTGAAGATCGAGCCCAACGAGGAAGTGAAGAAAGGCCTCTGGAAAACCCACGAGG
TGCTGAACCACGGAATCGCCTACTACATGAATATCCTGAAGCTGATCCGGCAAGAGGCCATC
TACGAGCACCACGAGCAGGACCCCAAGAATCCCAAGAAGGTGTCCAAGGCCGAGATCCAGGC
CGAGCTGTGGGATTTCGTGCTGAAGATGCAGAAGTGCAACAGCTTCACACACGAGGTGGACA
AGGACGAGGTGTTCAACATCCTGAGAGAGCTGTACGAGGAACTGGTGCCCAGCAGCGTGGAA
AAGAAGGGCGAAGCCAACCAGCTGAGCAACAAGTTTCTGTACCCTCTGGTGGACCCCAACAG
CCAGTCTGGAAAGGGAACAGCCAGCAGCGGCAGAAAGCCCAGATGGTACAACCTGAAGATTG
CCGGCGATCCCTCCTGGGAAGAAGAGAAGAAGAAGTGGGAAGAAGATAAGAAAAAGGACCCG
CTGGCCAAGATCCTGGGCAAGCTGGCTGAGTACGGACTGATCCCTCTGTTCATCCCCTACAC
CGACAGCAACGAGCCCATCGTGAAAGAAATCAAGTGGATGGAAAAGTCCCGGAACCAGAGCG
TGCGGCGGCTGGATAAGGACATGTTCATTCAGGCCCTGGAACGGTTCCTGAGCTGGGAGAGC
TGGAACCTGAAAGTGAAAGAGGAATACGAGAAGGTCGAGAAAGAGTACAAGACCCTGGAAGA
GAGGATCAAAGAGGACATCCAGGCTCTGAAGGCTCTGGAACAGTATGAGAAAGAGCGGCAAG
AACAGCTGCTGCGGGACACCCTGAACACCAACGAGTACCGGCTGAGCAAGAGAGGCCTTAGA
GGCTGGCGGGAAATCATCCAGAAATGGCTGAAAATGGACGAGAACGAGCCCTCCGAGAAGTA
CCTGGAAGTGTTCAAGGACTACCAGCGGAAGCACCCTAGAGAGGCCGGCGATTACAGCGTGT
ACGAGTTCCTGTCCAAGAAAGAGAACCACTTCATCTGGCGGAATCACCCTGAGTACCCCTAC
CTGTACGCCACCTTCTGCGAGATCGACAAGAAAAAGAAGGACGCCAAGCAGCAGGCCACCTT
CACACTGGCCGATCCTATCAATCACCCTCTGTGGGTCCGATTCGAGGAAAGAAGCGGCAGCA
ACCTGAACAAGTACAGAATCCTGACCGAGCAGCTGCACACCGAGAAGCTGAAGAAAAAGCTG
ACAGTGCAGCTGGACCGGCTGATCTACCCTACAGAATCTGGCGGCTGGGAAGAGAAGGGCAA
AGTGGACATTGTGCTGCTGCCCAGCCGGCAGTTCTACAACCAGATCTTCCTGGACATCGAGG
AAAAGGGCAAGCACGCCTTCACCTACAAGGATGAGAGCATCAAGTTCCCTCTGAAGGGCACA
CTCGGCGGAGCCAGAGTGCAGTTCGACAGAGATCACCTGAGAAGATACCCTCACAAGGTGGA
AAGCGGCAACGTGGGCAGAATCTACTTCAACATGACCGTGAACATCGAGCCTACAGAGTCCC
CAGTGTCCAAGTCTCTGAAGATCCACCGGGACGACTTCCCCAAGGTGGTCAACTTCAAGCCC
AAAGAACTGACCGAGTGGATCAAGGACAGCAAGGGCAAGAAACTGAAGTCCGGCATCGAGTC
CCTGGAAATCGGCCTGAGAGTGATGAGCATCGACCTGGGACAGAGACAGGCCGCTGCCGCCT
CTATTTTCGAGGTGGTGGATCAGAAGCCCGACATCGAAGGCAAGCTGTTTTTCCCAATCAAG
GGCACCGAGCTGTATGCCGTGCACAGAGCCAGCTTCAACATCAAGCTGCCCGGCGAGACACT
GGTCAAGAGCAGAGAAGTGCTGCGGAAGGCCAGAGAGGACAATCTGAAACTGATGAACCAGA
AGCTCAACTTCCTGCGGAACGTGCTGCACTTCCAGCAGTTCGAGGACATCACCGAGAGAGAG
AAGCGGGTCACCAAGTGGATCAGCAGACAAGAGAACAGCGACGTGCCCCTGGTGTACCAGGA
TGAGCTGATCCAGATCCGCGAGCTGATGTACAAGCCTTACAAGGACTGGGTCGCCTTCCTGA
AGCAGCTCCACAAGAGACTGGAAGTCGAGATCGGCAAAGAAGTGAAGCACTGGCGGAAGTCC
CTGAGCGACGGAAGAAAGGGCCTGTACGGCATCTCCCTGAAGAACATCGACGAGATCGATCG
GACCCGGAAGTTCCTGCTGAGATGGTCCCTGAGGCCTACCGAACCTGGCGAAGTGCGTAGAC
TGGAACCCGGCCAGAGATTCGCCATCGACCAGCTGAATCACCTGAACGCCCTGAAAGAAGAT
CGGCTGAAGAAGATGGCCAACACCATCATCATGCACGCCCTGGGCTACTGCTACGACGTGCG
GAAGAAGAAATGGCAGGCTAAGAACCCCGCCTGCCAGATCATCCTGTTCGAGGATCTGAGCA
ACTACAACCCCTACGAGGAAAGGTCCCGCTTCGAGAACAGCAAGCTCATGAAGTGGTCCAGA
CGCGAGATCCCCAGACAGGTTGCACTGCAGGGCGAGATCTATGGCCTGCAAGTGGGAGAAGT
GGGCGCTCAGTTCAGCAGCAGATTCCACGCCAAGACAGGCAGCCCTGGCATCAGATGTAGCG
TCGTGACCAAAGAGAAGCTGCAGGACAATCGGTTCTTCAAGAATCTGCAGAGAGAGGGCAGA
CTGACCCTGGACAAAATCGCCGTGCTGAAAGAGGGCGATCTGTACCCAGACAAAGGCGGCGA
GAAGTTCATCAGCCTGAGCAAGGATCGGAAGTGCGTGACCACACACGCCGACATCAACGCCG
CTCAGAACCTGCAGAAGCGGTTCTGGACAAGAACCCACGGCTTCTACAAGGTGTACTGCAAG
GCCTACCAGGTGGACGGCCAGACCGTGTACATCCCTGAGAGCAAGGACCAGAAGCAGAAGAT
CATCGAAGAGTTCGGCGAGGGCTACTTCATTCTGAAGGACGGGGTGTACGAATGGGTCAACG
CCGGCAAGCTGAAAATCAAGAAGGGCAGCTCCAAGCAGAGCAGCAGCGAGCTGGTGGATAGC
GACATCCTGAAAGACAGCTTCGACCTGGCCTCCGAGCTGAAAGGCGAAAAGCTGATGCTGTA
CAGGGACCCCAGCGGCAATGTGTTCCCCAGCGACAAATGGATGGCCGCTGGCGTGTTCTTCG
GAAAGCTGGAACGCATCCTGATCAGCAAGCTGACCAACCAGTACTCCATCAGCACCATCGAG
GACGACAGCAGCAAGCAGTCTATGAAAAGGCCGGCGGCCACGAAAAAGGCCGGCCAGGCAAA
AAAGAAAAAG
In some embodiments, the Cas12b is BvCas12B, which is a variant of BhCas12b and
comprises the following changes relative to BhCas12B: S893R, K846R, and E837G.
BvCas12b (Bacillus sp. V3-13) NCBI Reference Sequence: WP_101661451.1
(SEQ ID NO: 122)
MAIRSIKLKMKTNSGTDSIYLRKALWRTHQLINEGIAYYMNLLTLYRQEAIGDKTKEAYQAE
LINIIRNQQRNNGSSEEHGSDQEILALLRQLYELIIPSSIGESGDANQLGNKFLYPLVDPNS
QSGKGTSNAGRKPRWKRLKEEGNPDWELEKKKDEERKAKDPTVKIFDNLNKYGLLPLFPLFT
NIQKDIEWLPLGKRQSVRKWDKDMFIQAIERLLSWESWNRRVADEYKQLKEKTESYYKEHLT
GGEEWIEKIRKFEKERNMELEKNAFAPNDGYFITSRQIRGWDRVYEKWSKLPESASPEELWK
VVAEQQNKMSEGFGDPKVFSFLANRENRDIWRGHSERIYHIAAYNGLQKKLSRTKEQATFTL
PDAIEHPLWIRYESPGGTNLNLFKLEEKQKKNYYVTLSKIIWPSEEKWIEKENIEIPLAPSI
QFNRQIKLKQHVKGKQEISFSDYSSRISLDGVLGGSRIQFNRKYIKNHKELLGEGDIGPVFF
NLVVDVAPLQETRNGRLQSPIGKALKVISSDFSKVIDYKPKELMDWMNTGSASNSFGVASLL
EGMRVMSIDMGQRTSASVSIFEVVKELPKDQEQKLFYSINDTELFAIHKRSFLLNLPGEVVT
KNNKQQRQERRKKRQFVRSQIRMLANVLRLETKKTPDERKKAIHKLMEIVQSYDSWTASQKE
VWEKELNLLTNMAAFNDEIWKESLVELHHRIEPYVGQIVSKWRKGLSEGRKNLAGISMWNID
ELEDTRRLLISWSKRSRTPGEANRIETDEPFGSSLLQHIQNVKDDRLKQMANLIIMTALGFK
YDKEEKDRYKRWKETYPACQIILFENLNRYLFNLDRSRRENSRLMKWAHRSIPRTVSMQGEM
FGLQVGDVRSEYSSRFHAKTGAPGIRCHALTEEDLKAGSNTLKRLIEDGFINESELAYLKKG
DIIPSQGGELFVTLSKRYKKDSDNNELTVIHADINAAQNLQKRFWQQNSEVYRVPCQLARMG
EDKLYIPKSQTETIKKYFGKGSFVKNNTEQEVYKWEKSEKMKIKTDTTFDLQDLDGFEDISK
TIELAQEQQKKYLTMFRDPSGYFFNNETWRPQKEYWSIVNNIIKSCLKKKILSNKVEL
In some embodiments, the Cas12b is BTCas12b.BTCas12b (Bacillus
thermoamylovorans) NCBI Reference Sequence: WP_041902512
(SEQ ID NO: 123)
MATRSEILKIEPNEEVKKGLWKTHEVLNHGIAYYMNILKLIRQEAIYEHHEQDPKNPKKV
SKAEIQAELWDFVLKMQKCNSFTHEVDKDVVFNILRELYEELVPSSVEKKGEANQLSNKF
LYPLVDPNSQSGKGTASSGRKPRWYNLKIAGDPSWEEEKKKWEEDKKKDPLAKILGKLAE
YGLIPLFIPFTDSNEPIVKEIKWMEKSRNQSVRRLDKDMFIQALERFLSWESWNLKVKEE
YEKVEKEHKTLEERIKEDIQAFKSLEQYEKERQEQLLRDTLNTNEYRLSKRGLRGWREII
QKWLKMDENEPSEKYLEVFKDYQRKHPREAGDYSVYEFLSKKENHFIWRNHPEYPYLYAT
FCEIDKKKKDAKQQATFTLADPINHPLWVRFEERSGSNLNKYRILTEQLHTEKLKKKLTV
QLDRLIYPTESGGWEEKGKVDIVLLPSRQFYNQIFLDIEEKGKHAFTYKDESIKFPLKGT
LGGARVQFDRDHLRRYPHKVESGNVGRIYFNMTVNIEPTESPVSKSLKIHRDDFPKFVNF
KPKELTEWIKDSKGKKLKSGIESLEIGLRVMSIDLGQRQAAAASIFEVVDQKPDIEGKLF
FPIKGTELYAVHRASFNIKLPGETLVKSREVLRKAREDNLKLMNQKLNFLRNVLHFQQFE
DITEREKRVTKWISRQENSDVPLVYQDELIQIRELMYKPYKDWVAFLKQLHKRLEVEIGK
EVKHWRKSLSDGRKGLYGISLKNIDEIDRTRKFLLRWSLRPTEPGEVRRLEPGQRFAIDQ
LNHLNALKEDRLKKMANTIIMHALGYCYDVRKKKWQAKNPACQIILFEDLSNYNPYEERS
RFENSKLMKWSRREIPRQVALQGEIYGLQVGEVGAQFSSRFHAKTGSPGIRCSVVTKEKL
QDNRFFKNLQREGRLTLDKIAVLKEGDLYPDKGGEKFISLSKDRKLVTTHADINAAQNLQ
KRFWTRTHGFYKVYCKAYQVDGQTVYIPESKDQKQKIIEEFGEGYFILKDGVYEWGNAGK
LKIKKGSSKQSSSELVDSDILKDSFDLASELKGEKLMLYRDPSGNVFPSDKWMAAGVFFG
KLERILISKLTNQYSISTIEDDSSKQSM

[0407] In some embodiments, a napDNAbp refers to Cas12c. In some embodiments, the Cas12c protein is a Cas12c1 or a variant of Cas12c1. In some embodiments, the Cas12 protein is a Cas12c2 or a variant of Cas12c2. In some embodiments, the Cas12 protein is a Cas12c protein from Oleiphilus sp. HI0009 (i.e., OspCas12c) or a variant of OspCas12c. These Cas12c molecules have been described in Yan et al., “Functionally Diverse Type V CRISPR-Cas Systems,” Science, 2019 Jan. 4; 363: 88-91; the entire contents of which is hereby incorporated by reference. In some embodiments, the napDNAbp comprises an amino acid sequence that is at least 85%, at least 90%, at least 91%, at least 92%, at least 93%, at least 94%, at least 95%, at least 96%, at least 97%, at least 98%, at least 99%, or at least 99.5% identical to a naturally-occurring Cas12c1, Cas12c2, or OspCas12c protein. In some embodiments, the napDNAbp is a naturally-occurring Cas12c1, Cas12c2, or OspCas12c protein. In some embodiments, the napDNAbp comprises an amino acid sequence that is at least 85%, at least 90%, at least 91%, at least 92%, at least 93%, at least 94%, at least 95%, at least 96%, at least 97%, at least 98%, at least 99%, or at ease 99.5% identical to any Cas12c1, Cas12c2, or OspCas12c protein described herein. It should be appreciated that Cas12c1, Cas12c2, or OspCas12c from other bacterial species may also be used in accordance with the present disclosure.

Cas12c1
(SEQ ID NO: 124)
MQTKKTHLHLISAKASRKYRRTIACLSDTAKKDLERRKQSGAADPAQELSCLKTIKFKLEVP
EGSKLPSFDRISQIYNALETIEKGSLSYLLFALILSGFRIFPNSSAAKTFASSSCYKNDQFA
SQIKEIFGEMVKNFIPSELESILKKGRRKNNKDWTEENIKRVLNSEFGRKNSEGSSALFDSF
LSKFSQELFRKFDSWNEVNKKYLEAAELLDSMLASYGPFDSVCKMIGDSDSRNSLPDKSTIA
FTNNAEITVDIESSVMPYMAIAALLREYRQSKSKAAPVAYVQSHLTTTNGNGLSWFFKFGLD
LIRKAPVSSKQSTSDGSKSLQELFSVPDDKLDGLKFIKEACEALPEASLLCGEKGELLGYQD
FRTSFAGHIDSWVANYVNRLFELIELVNQLPESIKLPSILTQKNHNLVASLGLQEAEVSHSL
ELFEGLVKNVRQTLKKLAGIDISSSPNEQDIKEFYAFSDVLNRLGSIRNQIENAVQTAKKDK
IDLESAIEWKEWKKLKKLPKLNGLGGGVPKQQELLDKALESVKQIRHYQRIDFERVIQWAVN
EHCLETVPKFLVDAEKKKINKESSTDFAAKENAVRFLLEGIGAAARGKTDSVSKAAYNWFVV
NNFLAKKDLNRYFINCQGCIYKPPYSKRRSLAFALRSDNKDTIEVVWEKFETFYKEISKEIE
KFNIFSQEFQTFLHLENLRMKLLLRRIQKPIPAEIAFFSLPQEYYDSLPPNVAFLALNQEIT
PSEYITQFNLYSSFLNGNLILLRRSRSYLRAKFSWVGNSKLIYAAKEARLWKIPNAYWKSDE
WKMILDSNVLVFDKAGNVLPAPTLKKVCEREGDLRLFYPLLRQLPHDWCYRNPFVKSVGREK
NVIEVNKEGEPKVASALPGSLFRLIGPAPFKSLLDDCFFNPLDKDLRECMLIVDQEISQKVE
AQKVEASLESCTYSIAVPIRYHLEEPKVSNQFENVLAIDQGEAGLAYAVFSLKSIGEAETKP
IAVGTIRIPSIRRLIHSVSTYRKKKQRLQNFKQNYDSTAFIMRENVTGDVCAKIVGLMKEFN
AFPVLEYDVKNLESGSRQLSAVYKAVNSHFLYFKEPGRDALRKQLWYGGDSWTIDGIEIVTR
ERKEDGKEGVEKIVPLKVFPGRSVSARFTSKTCSCCGRNVFDWLFTEKKAKTNKKFNVNSKG
ELTTADGVIQLFEADRSKGPKFYARRKERTPLTKPIAKGSYSLEEIERRVRTNLRRAPKSKQ
SRDTSQSQYFCVYKDCALHFSGMQADENAAINIGRRFLTALRKNRRSDFPSNVKISDRLLDN
Cas12c2
(SEQ ID NO: 125)
MTKHSIPLHAFRNSGADARKWKGRIALLAKRGKETMRTLQFPLEMSEPEAAAINTTPFAVAY
NAIEGTGKGTLFDYWAKLHLAGFRFFPSGGAATIFRQQAVFEDASWNAAFCQQSGKDWPWLV
PSKLYERFTKAPREVAKKDGSKKSIEFTQENVANESHVSLVGASITDKTPEDQKEFFLKMAG
ALAEKFDSWKSANEDRIVAMKVIDEFLKSEGLHLPSLENIAVKCSVETKPDNATVAWHDAPM
SGVQNLAIGVFATCASRIDNIYDLNGGKLSKLIQESATTPNVTALSWLFGKGLEYFRTTDID
TIMQDFNIPASAKESIKPLVESAQAIPTMTVLGKKNYAPFRPNFGGKIDSWIANYASRLMLL
NDILEQIEPGFELPQALLDNETLMSGIDMTGDELKELIEAVYAWVDAAKQGLATLLGRGGNV
DDAVQTFEQFSAMMDTLNGTLNTISARYVRAVEMAGKDEARLEKLIECKFDIPKWCKSVPKL
VGISGGLPKVEEEIKVMNAAFKDVRARMFVRFEEIAAYVASKGAGMDVYDALEKRELEQIKK
LKSAVPERAHIQAYRAVLHRIGRAVONCSEKTKQLFSSKVIEMGVFKNPSHLNNFIFNQKGA
IYRSPFDRSRHAPYQLHADKLLKNDWLELLAEISATLMASESTEQMEDALRLERTRLQLQLS
GLPDWEYPASLAKPDIEVEIQTALKMQLAKDTVTSDVLQRAFNLYSSVLSGLTFKLLRRSFS
LKMRFSVADTTQLIYVPKVCDWAIPKQYLQAEGEIGIAARVVTESSPAKMVTEVEMKEPKAL
GHFMQQAPHDWYFDASLGGTQVAGRIVEKGKEVGKERKLVGYRMRGNSAYKTVLDKSLVGNT
ELSQCSMIIEIPYTQTVDADFRAQVQAGLPKVSINLPVKETITASNKDEQMLFDRFVAIDLG
ERGLGYAVFDAKTLELQESGHRPIKAITNLLNRTHHYEQRPNQRQKFQAKFNVNLSELRENT
VGDVCHQINRICAYYNAFPVLEYMVPDRLDKQLKSVYESVTNRYIWSSTDAHKSARVQFWLG
GETWEHPYLKSAKDKKPLVLSPGRGASGKGTSQTCSCCGRNPFDLIKDMKPRAKIAVVDGKA
KLENSELKLFERNLESKDDMLARRHRNERAGMEQPLTPGNYTVDEIKALLRANLRRAPKNRR
TKDTTVSEYHCVFSDCGKTMHADENAAVNIGGKFIADIEK
OspCas12c
(SEQ ID NO: 126)
MTKLRHRQKKLTHDWAGSKKREVLGSNGKLQNPLLMPVKKGQVTEFRKAFSAYARATKGEMT
DGRKNMFTHSFEPFKTKPSLHQCELADKAYQSLHSYLPGSLAHFLLSAHALGFRIFSKSGEA
TAFQASSKIEAYESKLASELACVDLSIQNLTISTLFNALTTSVRGKGEETSADPLIARFYTL
LTGKPLSRDTQGPERDLAEVISRKIASSFGTWKEMTANPLQSLQFFEEELHALDANVSLSPA
FDVLIKMNDLQGDLKNRTIVFDPDAPVFEYNAEDPADIIIKLTARYAKEAVIKNQNVGNYVK
NAITTTNANGLGWLLNKGLSLLPVSTDDELLEFIGVERSHPSCHALIELIAQLEAPELFEKN
VFSDTRSEVQGMIDSAVSNHIARLSSSRNSLSMDSEELERLIKSFQIHTPHCSLFIGAQSLS
QQLESLPEALQSGVNSADILLGSTQYMLTNSLVEESIATYQRTLNRINYLSGVAGQINGAIK
RKAIDGEKIHLPAAWSELISLPFIGQPVIDVESDLAHLKNQYQTLSNEFDTLISALQKNFDL
NFNKALLNRTQHFEAMCRSTKKNALSKPEIVSYRDLLARLTSCLYRGSLVLRRAGIEVLKKH
KIFESNSELREHVHERKHFVFVSPLDRKAKKLLRLTDSRPDLLHVIDEILQHDNLENKDRES
LWLVRSGYLLAGLPDQLSSSFINLPIITQKGDRRLIDLIQYDQINRDAFVMLVTSAFKSNLS
GLQYRANKQSFVVTRTLSPYLGSKLVYVPKDKDWLVPSQMFEGRFADILQSDYMVWKDAGRL
CVIDTAKHLSNIKKSVFSSEEVLAFLRELPHRTFIQTEVRGLGVNVDGIAFNNGDIPSLKTF
SNCVQVKVSRTNTSLVQTLNRWFEGGKVSPPSIQFERAYYKKDDQIHEDAAKRKIRFQMPAT
ELVHASDDAGWTPSYLLGIDPGEYGMGLSLVSINNGEVLDSGFIHINSLINFASKKSNHQTK
VVPRQQYKSPYANYLEQSKDSAAGDIAHILDRLIYKLNALPVFEALSGNSQSAADQVWTKVL
SFYTWGDNDAQNSIRKQHWFGASHWDIKGMLRQPPTEKKPKPYIAFPGSQVSSYGNSQRCSC
CGRNPIEQLREMAKDTSIKELKIRNSEIQLEDGTIKLENPDPSTVIERRRHNLGPSRIPVAD
RTFKNISPSSLEFKELITIVSRSIRHSPEFIAKKRGIGSEYFCAYSDCNSSLNSEANAAANV
AQKFQKQLFFEL

[0408] In some embodiments, a napDNAbp refers to Cas12g, Cas12 h, or Cas12i, which have been described in, for example, Yan et al., “Functionally Diverse Type V CRISPR-Cas Systems,” Science, 2019 Jan. 4; 363: 88-91; the entire contents of each is hereby incorporated by reference. By aggregating more than 10 terabytes of sequence data, new classifications of Type V Cas proteins were identified that showed weak similarity to previously characterized Class V protein, including Cas12g, Cas12 h, and Cas12i. In some embodiments, the Cas12 protein is a Cas12g or a variant of Cas12g. In some embodiments, the Cas12 protein is a Cas12 h or a variant of Cas12 h. In some embodiments, the Cas12 protein is a Cas12i or a variant of Cas12i. It should be appreciated that other RNA-guided DNA binding proteins may be used as a napDNAbp, and are within the scope of this disclosure. In some embodiments, the napDNAbp comprises an amino acid sequence that is at least 85%, at least 90%, at least 91%, at least 92%, at least 93%, at least 94%, at least 95%, at least 96%, at least 97%, at least 98%, at least 99%, or at least 99.5% identical to a naturally-occurring Cas12g, Cas12 h, or Cas12i protein. In some embodiments, the napDNAbp is a naturally-occurring Cas12g, Cas12 h, or Cas12i protein. In some embodiments, the napDNAbp comprises an amino acid sequence that is at least 85%, at least 90%, at least 91%, at least 92%, at least 93%, at least 94%, at least 95%, at least 96%, at least 97%, at least 98%, at least 99%, or at ease 99.5% identical to any Cas12g, Cas12 h, or Cas12i protein described herein. It should be appreciated that Cas12g, Cas12 h, or Cas12i from other bacterial species may also be used in accordance with the present disclosure. In some embodiments, the Cas12i is a Cas12i1 or a Cas12i2.

Cas12g1
(SEQ ID NO: 127)
MAQASSTPAVSPRPRPRYREERTLVRKLLPRPGQSKQEFRENVKKLRKAFLQFNADVSGVCQ
WAIQFRPRYGKPAEPTETFWKFFLEPETSLPPNDSRSPEFRRLQAFEAAAGINGAAALDDPA
FTNELRDSILAVASRPKTKEAQRLFSRLKDYQPAHRMILAKVAAEWIESRYRRAHQNWERNY
EEWKKEKQEWEQNHPELTPEIREAFNQIFQQLEVKEKRVRICPAARLLQNKDNCQYAGKNKH
SVLCNQFNEFKKNHLQGKAIKFFYKDAEKYLRCGLQSLKPNVQGPFREDWNKYLRYMNLKEE
TLRGKNGGRLPHCKNLGQECEFNPHTALCKQYQQQLSSRPDLVQHDELYRKWRREYWREPRK
PVFRYPSVKRHSIAKIFGENYFQADFKNSVVGLRLDSMPAGQYLEFAFAPWPRNYRPQPGET
EISSVHLHFVGTRPRIGFRFRVPHKRSRFDCTQEELDELRSRTFPRKAQDQKFLEAARKRLL
ETFPGNAEQELRLLAVDLGTDSARAAFFIGKTFQQAFPLKIVKIEKLYEQWPNQKQAGDRRD
ASSKQPRPGLSRDHVGRHLQKMRAQASEIAQKRQELTGTPAPETTTDQAAKKATLQPFDLRG
LTVHTARMIRDWARLNARQIIQLAEENQVDLIVLESLRGFRPPGYENLDQEKKRRVAFFAHG
RIRRKVTEKAVERGMRVVTVPYLASSKVCAECRKKQKDNKQWEKNKKRGLFKCEGCGSQAQV
DENAARVLGRVFWGEIELPTAIP
Cas12h1
(SEQ ID NO: 128)
MKVHEIPRSQLLKIKQYEGSFVEWYRDLQEDRKKFASLLFRWAAFGYAAREDDGATYISPSQ
ALLERRLLLGDAEDVAIKFLDVLFKGGAPSSSCYSLFYEDFALRDKAKYSGAKREFIEGLAT
MPLDKIIERIRQDEQLSKIPAEEWLILGAEYSPEEIWEQVAPRIVNVDRSLGKQLRERLGIK
CRRPHDAGYCKILMEVVARQLRSHNETYHEYLNQTHEMKTKVANNLTNEFDLVCEFAEVLEE
KNYGLGWYVLWQGVKQALKEQKKPTKIQIAVDQLRQPKFAGLLTAKWRALKGAYDTWKLKKR
LEKRKAFPYMPNWDNDYQIPVGLTGLGVFTLEVKRTEVVVDLKEHGKLFCSHSHYFGDLTAE
KHPSRYHLKFRHKLKLRKRDSRVEPTIGPWIEAALREITIQKKPNGVFYLGLPYALSHGIDN
FQIAKRFFSAAKPDKEVINGLPSEMVVGAADLNLSNIVAPVKARIGKGLEGPLHALDYGYGE
LIDGPKILTPDGPRCGELISLKRDIVEIKSAIKEFKACQREGLTMSEETTTWLSEVESPSDS
PRCMIQSRIADTSRRLNSFKYQMNKEGYQDLAEALRLLDAMDSYNSLLESYQRMHLSPGEQS
PKEAKFDTKRASFRDLLRRRVAHTIVEYFDDCDIVFFEDLDGPSDSDSRNNALVKLLSPRTL
LLYIRQALEKRGIGMVEVAKDGTSQNNPISGHVGWRNKQNKSEIYFYEDKELLVMDADEVGA
MNILCRGLNHSVCPYSFVTKAPEKKNDEKKEGDYGKRVKRFLKDRYGSSNVRFLVASMGFVT
VTTKRPKDALVGKRLYYHGGELVTHDLHNRMKDEIKYLVEKEVLARRVSLSDSTIKSYKSFA
HV
Cas12i1
(SEQ ID NO: 129)
MSNKEKNASETRKAYTTKMIPRSHDRMKLLGNFMDYLMDGTPIFFELWNQFGGGIDRDIISG
TANKDKISDDLLLAVNWFKVMPINSKPQGVSPSNLANLFQQYSGSEPDIQAQEYFASNFDTE
KHQWKDMRVEYERLLAELQLSRSDMHHDLKLMYKEKCIGLSLSTAHYITSVMFGTGAKNNRQ
TKHQFYSKVIQLLEESTQINSVEQLASIILKAGDCDSYRKLRIRCSRKGATPSILKIVQDYE
LGTNHDDEVNVPSLIANLKEKLGRFEYECEWKCMEKIKAFLASKVGPYYLGSYSAMLENALS
PIKGMTTKNCKFVLKQIDAKNDIKYENEPFGKIVEGFFDSPYFESDTNVKWVLHPHHIGESN
IKTLWEDLNAIHSKYEEDIASLSEDKKEKRIKVYQGDVCQTINTYCEEVGKEAKTPLVQLLR
YLYSRKDDIAVDKIIDGITFLSKKHKVEKQKINPVIQKYPSFNFGNNSKLLGKIISPKDKLK
HNLKCNRNQVDNYIWIEIKVLNTKTMRWEKHHYALSSTRFLEEVYYPATSENPPDALAARFR
TKTNGYEGKPALSAEQIEQIRSAPVGLRKVKKRQMRLEAARQQNLLPRYTWGKDFNINICKR
GNNFEVTLATKVKKKKEKNYKVVLGYDANIVRKNTYAAIEAHANGDGVIDYNDLPVKPIESG
FVTVESQVRDKSYDQLSYNGVKLLYCKPHVESRRSFLEKYRNGTMKDNRGNNIQIDFMKDFE
AIADDETSLYYFNMKYCKLLQSSIRNHSSQAKEYREEIFELLRDGKLSVLKLSSLSNLSFVM
FKVAKSLIGTYFGHLLKKPKNSKSDVKAPPITDEDKQKADPEMFALRLALEEKRLNKVKSKK
EVIANKIVAKALELRDKYGPVLIKGENISDTTKKGKKSSTNSFLMDWLARGVANKVKEMVMM
HQGLEFVEVNPNFTSHQDPFVHKNPENTFRARYSRCTPSELTEKNRKEILSFLSDKPSKRPT
NAYYNEGAMAFLATYGLKKNDVLGVSLEKFKQIMANILHQRSEDQLLFPSRGGMFYLATYKL
DADATSVNWNGKQFWVCNADLVAAYNVGLVDIQKDFKKK
Cas12i2
(SEQ ID NO: 130)
MSSAIKSYKSVLRPNERKNQLLKSTIQCLEDGSAFFFKMLQGLFGGITPEIVRFSTEQEKQQ
QDIALWCAVNWFRPVSQDSLTHTIASDNLVEKFEEYYGGTASDAIKQYFSASIGESYYWNDC
RQQYYDLCRELGVEVSDLTHDLEILCREKCLAVATESNQNNSIISVLFGTGEKEDRSVKLRI
TKKILEAISNLKEIPKNVAPIQEIILNVAKATKETFRQVYAGNLGAPSTLEKFIAKDGQKEF
DLKKLQTDLKKVIRGKSKERDWCCQEELRSYVEQNTIQYDLWAWGEMFNKAHTALKIKSTRN
YNFAKQRLEQFKEIQSLNNLLVVKKLNDFFDSEFFSGEETYTICVHHLGGKDLSKLYKAWED
DPADPENAIVVLCDDLKNNFKKEPIRNILRYIFTIRQECSAQDILAAAKYNQQLDRYKSQKA
NPSVLGNQGFTWTNAVILPEKAQRNDRPNSLDLRIWLYLKLRHPDGRWKKHHIPFYDTRFFQ
EIYAAGNSPVDTCQFRTPRFGYHLPKLTDQTAIRVNKKHVKAAKTEARIRLAIQQGTLPVSN
LKITEISATINSKGQVRIPVKFDVGRQKGTLQIGDRFCGYDQNQTASHAYSLWEVVKEGQYH
KELGCFVRFISSGDIVSITENRGNQFDQLSYEGLAYPQYADWRKKASKFVSLWQITKKNKKK
EIVTVEAKEKFDAICKYQPRLYKFNKEYAYLLRDIVRGKSLVELQQIRQEIFRFIEQDCGVT
RLGSLSLSTLETVKAVKGIIYSYFSTALNASKNNPISDEQRKEFDPELFALLEKLELIRTRK
KKQKVERIANSLIQTCLENNIKFIRGEGDLSTTNNATKKKANSRSMDWLARGVFNKIRQLAP
MHNITLFGCGSLYTSHQDPLVHRNPDKAMKCRWAAIPVKDIGDWVLRKLSQNLRAKNIGTGE
YYHQGVKEFLSHYELQDLEEELLKWRSDRKSNIPCWVLQNRLAEKLGNKEAVVYIPVRGGRI
YFATHKVATGAVSIVFDQKQVWVCNADHVAAANIALTVKGIGEQSSDEENPDGSRIKLQLTS

[0409] Representative nucleic acid and protein sequences of the base editors follow:

BhCas12b GGSGGS-ABE8-Xten20 at P153
(SEQ ID NO: 131)

[chemical structure]

CAGATCCTTCATCCTGAAGATCGAGCCCAACGAGGAAGTGAAGAAAGGCCTCTGGAAAACCC
ACGAGGTGCTGAACCACGGAATCGCCTACTACATGAATATCCTGAAGCTGATCCGGCAAGAG
GCCATCTACGAGCACCACGAGCAGGACCCCAAGAATCCCAAGAAGGTGTCCAAGGCCGAGAT
CCAGGCCGAGCTGTGGGATTTCGTGCTGAAGATGCAGAAGTGCAACAGCTTCACACACGAGG
TGGACAAGGACGAGGTGTTCAACATCCTGAGAGAGCTGTACGAGGAACTGGTGCCCAGCAGC
GTGGAAAAGAAGGGCGAAGCCAACCAGCTGAGCAACAAGTTTCTGTACCCTCTGGTGGACCC
CAACAGCCAGTCTGGAAAGGGAACAGCCAGCAGCGGCAGAAAGCCCAGATGGTACAACCTGA

[chemical structure]

[chemical structure]

[chemical structure]

[chemical structure]

[chemical structure]

[chemical structure]

[chemical structure]

[chemical structure]

[chemical structure]

GCACAAGCGAGAGCGCCACCCCTGAGAGCTCTGGCTCCTGGGAAGAAGAGAAGAAGAAGTGG
GAAGAAGATAAGAAAAAGGACCCGCTGGCCAAGATCCTGGGCAAGCTGGCTGAGTACGGACT
GATCCCTCTGTTCATCCCCTACACCGACAGCAACGAGCCCATCGTGAAAGAAATCAAGTGGA
TGGAAAAGTCCCGGAACCAGAGCGTGCGGCGGCTGGATAAGGACATGTTCATTCAGGCCCTG
GAACGGTTCCTGAGCTGGGAGAGCTGGAACCTGAAAGTGAAAGAGGAATACGAGAAGGTCGA
GAAAGAGTACAAGACCCTGGAAGAGAGGATCAAAGAGGACATCCAGGCTCTGAAGGCTCTGG
AACAGTATGAGAAAGAGCGGCAAGAACAGCTGCTGCGGGACACCCTGAACACCAACGAGTAC
CGGCTGAGCAAGAGAGGCCTTAGAGGCTGGCGGGAAATCATCCAGAAATGGCTGAAAATGGA
CGAGAACGAGCCCTCCGAGAAGTACCTGGAAGTGTTCAAGGACTACCAGCGGAAGCACCCTA
GAGAGGCCGGCGATTACAGCGTGTACGAGTTCCTGTCCAAGAAAGAGAACCACTTCATCTGG
CGGAATCACCCTGAGTACCCCTACCTGTACGCCACCTTCTGCGAGATCGACAAGAAAAAGAA
GGACGCCAAGCAGCAGGCCACCTTCACACTGGCCGATCCTATCAATCACCCTCTGTGGGTCC
GATTCGAGGAAAGAAGCGGCAGCAACCTGAACAAGTACAGAATCCTGACCGAGCAGCTGCAC
ACCGAGAAGCTGAAGAAAAAGCTGACAGTGCAGCTGGACCGGCTGATCTACCCTACAGAATC
TGGCGGCTGGGAAGAGAAGGGCAAAGTGGACATTGTGCTGCTGCCCAGCCGGCAGTTCTACA
ACCAGATCTTCCTGGACATCGAGGAAAAGGGCAAGCACGCCTTCACCTACAAGGATGAGAGC
ATCAAGTTCCCTCTGAAGGGCACACTCGGCGGAGCCAGAGTGCAGTTCGACAGAGATCACCT
GAGAAGATACCCTCACAAGGTGGAAAGCGGCAACGTGGGCAGAATCTACTTCAACATGACCG
TGAACATCGAGCCTACAGAGTCCCCAGTGTCCAAGTCTCTGAAGATCCACCGGGACGACTTC
CCCAAGGTGGTCAACTTCAAGCCCAAAGAACTGACCGAGTGGATCAAGGACAGCAAGGGCAA
GAAACTGAAGTCCGGCATCGAGTCCCTGGAAATCGGCCTGAGAGTGATGAGCATCGACCTGG
GACAGAGACAGGCCGCTGCCGCCTCTATTTTCGAGGTGGTGGATCAGAAGCCCGACATCGAA
GGCAAGCTGTTTTTCCCAATCAAGGGCACCGAGCTGTATGCCGTGCACAGAGCCAGCTTCAA
CATCAAGCTGCCCGGCGAGACACTGGTCAAGAGCAGAGAAGTGCTGCGGAAGGCCAGAGAGG
ACAATCTGAAACTGATGAACCAGAAGCTCAACTTCCTGCGGAACGTGCTGCACTTCCAGCAG
TTCGAGGACATCACCGAGAGAGAGAAGCGGGTCACCAAGTGGATCAGCAGACAAGAGAACAG
CGACGTGCCCCTGGTGTACCAGGATGAGCTGATCCAGATCCGCGAGCTGATGTACAAGCCTT
ACAAGGACTGGGTCGCCTTCCTGAAGCAGCTCCACAAGAGACTGGAAGTCGAGATCGGCAAA
GAAGTGAAGCACTGGCGGAAGTCCCTGAGCGACGGAAGAAAGGGCCTGTACGGCATCTCCCT
GAAGAACATCGACGAGATCGATCGGACCCGGAAGTTCCTGCTGAGATGGTCCCTGAGGCCTA
CCGAACCTGGCGAAGTGCGTAGACTGGAACCCGGCCAGAGATTCGCCATCGACCAGCTGAAT
CACCTGAACGCCCTGAAAGAAGATCGGCTGAAGAAGATGGCCAACACCATCATCATGCACGC
CCTGGGCTACTGCTACGACGTGCGGAAGAAGAAATGGCAGGCTAAGAACCCCGCCTGCCAGA
TCATCCTGTTCGAGGATCTGAGCAACTACAACCCCTACGAGGAAAGGTCCCGCTTCGAGAAC
AGCAAGCTCATGAAGTGGTCCAGACGCGAGATCCCCAGACAGGTTGCACTGCAGGGCGAGAT
CTATGGCCTGCAAGTGGGAGAAGTGGGCGCTCAGTTCAGCAGCAGATTCCACGCCAAGACAG
GCAGCCCTGGCATCAGATGTAGCGTCGTGACCAAAGAGAAGCTGCAGGACAATCGGTTCTTC
AAGAATCTGCAGAGAGAGGGCAGACTGACCCTGGACAAAATCGCCGTGCTGAAAGAGGGCGA
TCTGTACCCAGACAAAGGCGGCGAGAAGTTCATCAGCCTGAGCAAGGATCGGAAGTGCGTGA
CCACACACGCCGACATCAACGCCGCTCAGAACCTGCAGAAGCGGTTCTGGACAAGAACCCAC
GGCTTCTACAAGGTGTACTGCAAGGCCTACCAGGTGGACGGCCAGACCGTGTACATCCCT
GAGAGCAAGGACCAGAAGCAGAAGATCATCGAAGAGTTCGGCGAGGGCTACTTCATTCTGAA
GGACGGGGTGTACGAATGGGTCAACGCCGGCAAGCTGAAAATCAAGAAGGGCAGCTCCAAGC
AGAGCAGCAGCGAGCTGGTGGATAGCGACATCCTGAAAGACAGCTTCGACCTGGCCTCCGAG
CTGAAAGGCGAAAAGCTGATGCTGTACAGGGACCCCAGCGGCAATGTGTTCCCCAGCGACAA
ATGGATGGCCGCTGGCGTGTTCTTCGGAAAGCTGGAACGCATCCTGATCAGCAAGCTGACCA
ACCAGTACTCCATCAGCACCATCGAGGACGACAGCAGCAAGCAGTCTATGAAAAGGCCGGCG

[chemical structure]

TTACGCTTATCCCTACGACGTGCCTGATTATGCATACCCATATGATGTCCCCGACTATGCCT
AA
(SEQ ID NO: 132)
MAPKKKRKVGIHGVPAAATRSFILKIEPNEEVKKGLWKTHEVLNHGIAYYMNILKLIRQEAI
YEHHEQDPKNPKKVSKAEIQAELWDFVLKMQKCNSFTHEVDKDEVFNILRELYEELVPSSVE
KKGEANQLSNKFLYPLVDPNSQSGKGTASSGRKPRWYNLKIAGDPGGSGGSSEVEFSHEYWM
RHALTLAKRARDEREVPVGAVLVLNNRVIGEGWNRAIGLHDPTAHAEIMALRQGGLVMQNYR
LYDATLYVTFEPCVMCAGAMIHSRIGRVVFGVRNAKTGAAGSLMDVLHHPGMNHRVEITEGI
LADECAALLCRFFRMPRRVFNAQKKAQSSTDGSSGSETPGTSESATPESSGSWEEEKKKWEE
DKKKDPLAKILGKLAEYGLIPLFIPYTDSNEPIVKEIKWMEKSRNQSVRRLDKDMFIQALER
FLSWESWNLKVKEEYEKVEKEYKTLEERIKEDIQALKALEQYEKERQEQLLRDTLNTNEYRL
SKRGLRGWREIIQKWLKMDENEPSEKYLEVFKDYQRKHPREAGDYSVYEFLSKKENHFIWRN
HPEYPYLYATFCEIDKKKKDAKQQATFTLADPINHPLWVRFEERSGSNLNKYRILTEQLHTE
KLKKKLTVQLDRLIYPTESGGWEEKGKVDIVLLPSRQFYNQIFLDIEEKGKHAFTYKDESIK
FPLKGTLGGARVQFDRDHLRRYPHKVESGNVGRIYFNMTVNIEPTESPVSKSLKIHRDDFPK
VVNFKPKELTEWIKDSKGKKLKSGIESLEIGLRVMSIDLGQRQAAAASIFEVVDQKPDIEGK
LFFPIKGTELYAVHRASFNIKLPGETLVKSREVLRKAREDNLKLMNQKLNFLRNVLHFQQFE
DITEREKRVTKWISRQENSDVPLVYQDELIQIRELMYKPYKDWVAFLKQLHKRLEVEIGKEV
KHWRKSLSDGRKGLYGISLKNIDEIDRTRKFLLRWSLRPTEPGEVRRLEPGQRFAIDQLNHL
NALKEDRLKKMANTIIMHALGYCYDVRKKKWQAKNPACQIILFEDLSNYNPYEERSRFENSK
LMKWSRREIPRQVALQGEIYGLQVGEVGAQFSSRFHAKTGSPGIRCSVVTKEKLQDNRFFKN
LQREGRLTLDKIAVLKEGDLYPDKGGEKFISLSKDRKCVTTHADINAAQNLQKRFWTRTHGF
YKVYCKAYQVDGQTVYIPESKDQKQKIIEEFGEGYFILKDGVYEWVNAGKLKIKKGSSKQSS
SELVDSDILKDSFDLASELKGEKLMLYRDPSGNVFPSDKWMAAGVFFGKLERILISKLTNQY
SISTIEDDSSKQSMKRPAATKKAGQAKKKKGSYPYDVPDYAYPYDVPDYAYPYDVPDYA
BhCas12b GGSGGS-ABE8-Xten20 at K255
(SEQ ID NO: 133)

[chemical structure]

CAGATCCTTCATCCTGAAGATCGAGCCCAACGAGGAAGTGAAGAAAGGCCTCTGGAAAACCC
ACGAGGTGCTGAACCACGGAATCGCCTACTACATGAATATCCTGAAGCTGATCCGGCAAGAG
GCCATCTACGAGCACCACGAGCAGGACCCCAAGAATCCCAAGAAGGTGTCCAAGGCCGAGAT
CCAGGCCGAGCTGTGGGATTTCGTGCTGAAGATGCAGAAGTGCAACAGCTTCACACACGAGG
TGGACAAGGACGAGGTGTTCAACATCCTGAGAGAGCTGTACGAGGAACTGGTGCCCAGCAGC
GTGGAAAAGAAGGGCGAAGCCAACCAGCTGAGCAACAAGTTTCTGTACCCTCTGGTGGACCC
CAACAGCCAGTCTGGAAAGGGAACAGCCAGCAGCGGCAGAAAGCCCAGATGGTACAACCTGA
AGATTGCCGGCGATCCCTCCTGGGAAGAAGAGAAGAAGAAGTGGGAAGAAGATAAGAAAAAG
GACCCGCTGGCCAAGATCCTGGGCAAGCTGGCTGAGTACGGACTGATCCCTCTGTTCATCCC
CTACACCGACAGCAACGAGCCCATCGTGAAAGAAATCAAGTGGATGGAAAAGTCCCGGAACC
AGAGCGTGCGGCGGCTGGATAAGGACATGTTCATTCAGGCCCTGGAACGGTTCCTGAGCTGG
GAGAGCTGGAACCTGAAAGTGAAAGAGGAATACGAGAAGGTCGAGAAAGAGTACAAGACCCT

[chemical structure]

[chemical structure]

[chemical structure]

[chemical structure]

[chemical structure]

[chemical structure]

[chemical structure]

[chemical structure]

[chemical structure]

CACAAGCGAGAGCGCCACCCCTGAGAGCTCTGGCGAGGACATCCAGGCTCTGAAGGCTCTGG
AACAGTATGAGAAAGAGCGGCAAGAACAGCTGCTGCGGGACACCCTGAACACCAACGAGTAC
CGGCTGAGCAAGAGAGGCCTTAGAGGCTGGCGGGAAATCATCCAGAAATGGCTGAAAATGGA
CGAGAACGAGCCCTCCGAGAAGTACCTGGAAGTGTTCAAGGACTACCAGCGGAAGCACCCTA
GAGAGGCCGGCGATTACAGCGTGTACGAGTTCCTGTCCAAGAAAGAGAACCACTTCATCTGG
CGGAATCACCCTGAGTACCCCTACCTGTACGCCACCTTCTGCGAGATCGACAAGAAAAAGAA
GGACGCCAAGCAGCAGGCCACCTTCACACTGGCCGATCCTATCAATCACCCTCTGTGGGTCC
GATTCGAGGAAAGAAGCGGCAGCAACCTGAACAAGTACAGAATCCTGACCGAGCAGCTGCAC
ACCGAGAAGCTGAAGAAAAAGCTGACAGTGCAGCTGGACCGGCTGATCTACCCTACAGAATC
TGGCGGCTGGGAAGAGAAGGGCAAAGTGGACATTGTGCTGCTGCCCAGCCGGCAGTTCTACA
ACCAGATCTTCCTGGACATCGAGGAAAAGGGCAAGCACGCCTTCACCTACAAGGATGAGAGC
ATCAAGTTCCCTCTGAAGGGCACACTCGGCGGAGCCAGAGTGCAGTTCGACAGAGATCACCT
GAGAAGATACCCTCACAAGGTGGAAAGCGGCAACGTGGGCAGAATCTACTTCAACATGACCG
TGAACATCGAGCCTACAGAGTCCCCAGTGTCCAAGTCTCTGAAGATCCACCGGGACGACTTC
CCCAAGGTGGTCAACTTCAAGCCCAAAGAACTGACCGAGTGGATCAAGGACAGCAAGGGCAA
GAAACTGAAGTCCGGCATCGAGTCCCTGGAAATCGGCCTGAGAGTGATGAGCATCGACCTGG
GACAGAGACAGGCCGCTGCCGCCTCTATTTTCGAGGTGGTGGATCAGAAGCCCGACATCGAA
GGCAAGCTGTTTTTCCCAATCAAGGGCACCGAGCTGTATGCCGTGCACAGAGCCAGCTTCAA
CATCAAGCTGCCCGGCGAGACACTGGTCAAGAGCAGAGAAGTGCTGCGGAAGGCCAGAGAGG
ACAATCTGAAACTGATGAACCAGAAGCTCAACTTCCTGCGGAACGTGCTGCACTTCCAGCAG
TTCGAGGACATCACCGAGAGAGAGAAGCGGGTCACCAAGTGGATCAGCAGACAAGAGAACAG
CGACGTGCCCCTGGTGTACCAGGATGAGCTGATCCAGATCCGCGAGCTGATGTACAAGCCTT
ACAAGGACTGGGTCGCCTTCCTGAAGCAGCTCCACAAGAGACTGGAAGTCGAGATCGGCAAA
GAAGTGAAGCACTGGCGGAAGTCCCTGAGCGACGGAAGAAAGGGCCTGTACGGCATCTCCCT
GAAGAACATCGACGAGATCGATCGGACCCGGAAGTTCCTGCTGAGATGGTCCCTGAGGCCTA
CCGAACCTGGCGAAGTGCGTAGACTGGAACCCGGCCAGAGATTCGCCATCGACCAGCTGAAT
CACCTGAACGCCCTGAAAGAAGATCGGCTGAAGAAGATGGCCAACACCATCATCATGCACGC
CCTGGGCTACTGCTACGACGTGCGGAAGAAGAAATGGCAGGCTAAGAACCCCGCCTGCCAGA
TCATCCTGTTCGAGGATCTGAGCAACTACAACCCCTACGAGGAAAGGTCCCGCTTCGAGAAC
AGCAAGCTCATGAAGTGGTCCAGACGCGAGATCCCCAGACAGGTTGCACTGCAGGGCGAGAT
CTATGGCCTGCAAGTGGGAGAAGTGGGCGCTCAGTTCAGCAGCAGATTCCACGCCAAGACAG
GCAGCCCTGGCATCAGATGTAGCGTCGTGACCAAAGAGAAGCTGCAGGACAATCGGTTCTTC
AAGAATCTGCAGAGAGAGGGCAGACTGACCCTGGACAAAATCGCCGTGCTGAAAGAGGGCGA
TCTGTACCCAGACAAAGGCGGCGAGAAGTTCATCAGCCTGAGCAAGGATCGGAAGTGCGTGA
CCACACACGCCGACATCAACGCCGCTCAGAACCTGCAGAAGCGGTTCTGGACAAGAACCCAC
GGCTTCTACAAGGTGTACTGCAAGGCCTACCAGGTGGACGGCCAGACCGTGTACATCCCTGA
GAGCAAGGACCAGAAGCAGAAGATCATCGAAGAGTTCGGCGAGGGCTACTTCATTCTGAAGG
ACGGGGTGTACGAATGGGTCAACGCCGGCAAGCTGAAAATCAAGAAGGGCAGCTCCAAGCAG
AGCAGCAGCGAGCTGGTGGATAGCGACATCCTGAAAGACAGCTTCGACCTGGCCTCCGAGCT
GAAAGGCGAAAAGCTGATGCTGTACAGGGACCCCAGCGGCAATGTGTTCCCCAGCGACAAAT
GGATGGCCGCTGGCGTGTTCTTCGGAAAGCTGGAACGCATCCTGATCAGCAAGCTGACCAAC
CAGTACTCCATCAGCACCATCGAGGACGACAGCAGCAAGCAGTCTATGAAAAGGCCGGCGGC

[chemical structure]

ACGCTTATCCCTACGACGTGCCTGATTATGCATACCCATATGATGTCCCCGACTATGCCTAA
(SEQ ID NO: 134)
MAPKKKRKVGIHGVPAAATRSFILKIEPNEEVKKGLWKTHEVLNHGIAYYMNILKLIRQEAI
YEHHEQDPKNPKKVSKAEIQAELWDFVLKMQKCNSFTHEVDKDEVFNILRELYEELVPSSVE
KKGEANQLSNKFLYPLVDPNSQSGKGTASSGRKPRWYNLKIAGDPSWEEEKKKWEEDKKKDP
LAKILGKLAEYGLIPLFIPYTDSNEPIVKEIKWMEKSRNQSVRRLDKDMFIQALERFLSWES
WNLKVKEEYEKVEKEYKTLEERIKGGSGGSSEVEFSHEYWMRHALTLAKRARDEREVPVGAV
LVLNNRVIGEGWNRAIGLHDPTAHAEIMALRQGGLVMQNYRLYDATLYVTFEPCVMCAGAMI
HSRIGRVVFGVRNAKTGAAGSLMDVLHHPGMNHRVEITEGILADECAALLCRFFRMPRRVFN
AQKKAQSSTDGSSGSETPGTSESATPESSGEDIQALKALEQYEKERQEQLLRDTLNTNEYRL
SKRGLRGWREIIQKWLKMDENEPSEKYLEVFKDYQRKHPREAGDYSVYEFLSKKENHFIWRN
HPEYPYLYATFCEIDKKKKDAKQQATFTLADPINHPLWVRFEERSGSNLNKYRILTEQLHTE
KLKKKLTVQLDRLIYPTESGGWEEKGKVDIVLLPSRQFYNQIFLDIEEKGKHAFTYKDESIK
FPLKGTLGGARVQFDRDHLRRYPHKVESGNVGRIYFNMTVNIEPTESPVSKSLKIHRDDFPK
VVNEKPKELTEWIKDSKGKKLKSGIESLEIGLRVMSIDLGQRQAAAASIEEVVDQKPDIEGK
LFFPIKGTELYAVHRASFNIKLPGETLVKSREVLRKAREDNLKLMNQKLNFLRNVLHFQQFE
DITEREKRVTKWISRQENSDVPLVYQDELIQIRELMYKPYKDWVAFLKQLHKRLEVEIGKEV
KHWRKSLSDGRKGLYGISLKNIDEIDRTRKFLLRWSLRPTEPGEVRRLEPGQRFAIDQLNHL
NALKEDRLKKMANTIIMHALGYCYDVRKKKWQAKNPACQIILFEDLSNYNPYEERSRFENSK
LMKWSRREIPRQVALQGEIYGLQVGEVGAQFSSRFHAKTGSPGIRCSVVTKEKLQDNRFFKN
LQREGRLTLDKIAVLKEGDLYPDKGGEKFISLSKDRKCVTTHADINAAQNLQKRFWTRTHGF
YKVYCKAYQVDGQTVYIPESKDQKQKIIEEFGEGYFILKDGVYEWVNAGKLKIKKGSSKQSS
SELVDSDILKDSFDLASELKGEKLMLYRDPSGNVFPSDKWMAAGVFFGKLERILISKLTNQY
SISTIEDDSSKQSMKRPAATKKAGQAKKKKGSYPYDVPDYAYPYDVPDYAYPYDVPDYA
BhCas12b GGSGGS-ABE8-Xten20 at D306
(SEQ ID NO: 135)

[chemical structure]

CAGATCCTTCATCCTGAAGATCGAGCCCAACGAGGAAGTGAAGAAAGGCCTCTGGAAAACCC
ACGAGGTGCTGAACCACGGAATCGCCTACTACATGAATATCCTGAAGCTGATCCGGCAAGAG
GCCATCTACGAGCACCACGAGCAGGACCCCAAGAATCCCAAGAAGGTGTCCAAGGCCGAGAT
CCAGGCCGAGCTGTGGGATTTCGTGCTGAAGATGCAGAAGTGCAACAGCTTCACACACGAGG
TGGACAAGGACGAGGTGTTCAACATCCTGAGAGAGCTGTACGAGGAACTGGTGCCCAGCAGC
GTGGAAAAGAAGGGCGAAGCCAACCAGCTGAGCAACAAGTTTCTGTACCCTCTGGTGGACCC
CAACAGCCAGTCTGGAAAGGGAACAGCCAGCAGCGGCAGAAAGCCCAGATGGTACAACCTGA
AGATTGCCGGCGATCCCTCCTGGGAAGAAGAGAAGAAGAAGTGGGAAGAAGATAAGAAAAAG
GACCCGCTGGCCAAGATCCTGGGCAAGCTGGCTGAGTACGGACTGATCCCTCTGTTCATCCC
CTACACCGACAGCAACGAGCCCATCGTGAAAGAAATCAAGTGGATGGAAAAGTCCCGGAACC
AGAGCGTGCGGCGGCTGGATAAGGACATGTTCATTCAGGCCCTGGAACGGTTCCTGAGCTGG
GAGAGCTGGAACCTGAAAGTGAAAGAGGAATACGAGAAGGTCGAGAAAGAGTACAAGACCCT
GGAAGAGAGGATCAAAGAGGACATCCAGGCTCTGAAGGCTCTGGAACAGTATGAGAAAGAGC
GGCAAGAACAGCTGCTGCGGGACACCCTGAACACCAACGAGTACCGGCTGAGCAAGAGAGGC
CTTAGAGGCTGGCGGGAAATCATCCAGAAATGGCTGAAAATGGACggaggctctggaggaag

[chemical structure]

[chemical structure]

[chemical structure]

[chemical structure]

[chemical structure]

[chemical structure]

[chemical structure]

[chemical structure]

[chemical structure]

CAGAACGAGCCCTCCGAGAAGTACCTGGAAGTGTTCAAGGACTACCAGCGGAAGCACCCTA
GAGAGGCCGGCGATTACAGCGTGTACGAGTTCCTGTCCAAGAAAGAGAACCACTTCATCTGG
CGGAATCACCCTGAGTACCCCTACCTGTACGCCACCTTCTGCGAGATCGACAAGAAAAAGAA
GGACGCCAAGCAGCAGGCCACCTTCACACTGGCCGATCCTATCAATCACCCTCTGTGGGTCC
GATTCGAGGAAAGAAGCGGCAGCAACCTGAACAAGTACAGAATCCTGACCGAGCAGCTGCAC
ACCGAGAAGCTGAAGAAAAAGCTGACAGTGCAGCTGGACCGGCTGATCTACCCTACAGAATC
TGGCGGCTGGGAAGAGAAGGGCAAAGTGGACATTGTGCTGCTGCCCAGCCGGCAGTTCTACA
ACCAGATCTTCCTGGACATCGAGGAAAAGGGCAAGCACGCCTTCACCTACAAGGATGAGAGC
ATCAAGTTCCCTCTGAAGGGCACACTCGGCGGAGCCAGAGTGCAGTTCGACAGAGATCACCT
GAGAAGATACCCTCACAAGGTGGAAAGCGGCAACGTGGGCAGAATCTACTTCAACATGACCG
TGAACATCGAGCCTACAGAGTCCCCAGTGTCCAAGTCTCTGAAGATCCACCGGGACGACTTC
CCCAAGGTGGTCAACTTCAAGCCCAAAGAACTGACCGAGTGGATCAAGGACAGCAAGGGCAA
GAAACTGAAGTCCGGCATCGAGTCCCTGGAAATCGGCCTGAGAGTGATGAGCATCGACCTGG
GACAGAGACAGGCCGCTGCCGCCTCTATTTTCGAGGTGGTGGATCAGAAGCCCGACATCGAA
GGCAAGCTGTTTTTCCCAATCAAGGGCACCGAGCTGTATGCCGTGCACAGAGCCAGCTTCAA
CATCAAGCTGCCCGGCGAGACACTGGTCAAGAGCAGAGAAGTGCTGCGGAAGGCCAGAGAGG
ACAATCTGAAACTGATGAACCAGAAGCTCAACTTCCTGCGGAACGTGCTGCACTTCCAGCAG
TTCGAGGACATCACCGAGAGAGAGAAGCGGGTCACCAAGTGGATCAGCAGACAAGAGAACAG
CGACGTGCCCCTGGTGTACCAGGATGAGCTGATCCAGATCCGCGAGCTGATGTACAAGCCTT
ACAAGGACTGGGTCGCCTTCCTGAAGCAGCTCCACAAGAGACTGGAAGTCGAGATCGGCAAA
GAAGTGAAGCACTGGCGGAAGTCCCTGAGCGACGGAAGAAAGGGCCTGTACGGCATCTCCCT
GAAGAACATCGACGAGATCGATCGGACCCGGAAGTTCCTGCTGAGATGGTCCCTGAGGCCTA
CCGAACCTGGCGAAGTGCGTAGACTGGAACCCGGCCAGAGATTCGCCATCGACCAGCTGAAT
CACCTGAACGCCCTGAAAGAAGATCGGCTGAAGAAGATGGCCAACACCATCATCATGCACGC
CCTGGGCTACTGCTACGACGTGCGGAAGAAGAAATGGCAGGCTAAGAACCCCGCCTGCCAGA
TCATCCTGTTCGAGGATCTGAGCAACTACAACCCCTACGAGGAAAGGTCCCGCTTCGAGAAC
AGCAAGCTCATGAAGTGGTCCAGACGCGAGATCCCCAGACAGGTTGCACTGCAGGGCGAGAT
CTATGGCCTGCAAGTGGGAGAAGTGGGCGCTCAGTTCAGCAGCAGATTCCACGCCAAGACAG
GCAGCCCTGGCATCAGATGTAGCGTCGTGACCAAAGAGAAGCTGCAGGACAATCGGTTCTTC
AAGAATCTGCAGAGAGAGGGCAGACTGACCCTGGACAAAATCGCCGTGCTGAAAGAGGGCGA
TCTGTACCCAGACAAAGGCGGCGAGAAGTTCATCAGCCTGAGCAAGGATCGGAAGTGCGTGA
CCACACACGCCGACATCAACGCCGCTCAGAACCTGCAGAAGCGGTTCTGGACAAGAACCCAC
GGCTTCTACAAGGTGTACTGCAAGGCCTACCAGGTGGACGGCCAGACCGTGTACATCCCTGA
GAGCAAGGACCAGAAGCAGAAGATCATCGAAGAGTTCGGCGAGGGCTACTTCATTCTGAAGG
ACGGGGTGTACGAATGGGTCAACGCCGGCAAGCTGAAAATCAAGAAGGGCAGCTCCAAGCAG
AGCAGCAGCGAGCTGGTGGATAGCGACATCCTGAAAGACAGCTTCGACCTGGCCTCCGAGCT
GAAAGGCGAAAAGCTGATGCTGTACAGGGACCCCAGCGGCAATGTGTTCCCCAGCGACAAAT
GGATGGCCGCTGGCGTGTTCTTCGGAAAGCTGGAACGCATCCTGATCAGCAAGCTGACCAAC
CAGTACTCCATCAGCACCATCGAGGACGACAGCAGCAAGCAGTCTATGAAAAGGCCGGCGGC

[chemical structure]

ACGCTTATCCCTACGACGTGCCTGATTATGCATACCCATATGATGTCCCCGACTATGCCTAA
(SEQ ID NO: 136)
MAPKKKRKVGIHGVPAAATRSFILKIEPNEEVKKGLWKTHEVLNHGIAYYMNILKLIRQEAI
YEHHEQDPKNPKKVSKAEIQAELWDFVLKMQKCNSFTHEVDKDEVFNILRELYEELVPSSVE
KKGEANQLSNKFLYPLVDPNSQSGKGTASSGRKPRWYNLKIAGDPSWEEEKKKWEEDKKKDP
LAKILGKLAEYGLIPLFIPYTDSNEPIVKEIKWMEKSRNQSVRRLDKDMFIQALERFLSWES
WNLKVKEEYEKVEKEYKTLEERIKEDIQALKALEQYEKERQEQLLRDTLNTNEYRLSKRGLR
GWREIIQKWLKMDGGSGGSSEVEFSHEYWMRHALTLAKRARDEREVPVGAVLVLNNRVIGEG
WNRAIGLHDPTAHAEIMALRQGGLVMQNYRLYDATLYVTFEPCVMCAGAMIHSRIGRVVFGV
RNAKTGAAGSLMDVLHHPGMNHRVEITEGILADECAALLCRFFRMPRRVFNAQKKAQSSTDG
SSGSETPGTSESATPESSGENEPSEKYLEVFKDYQRKHPREAGDYSVYEFLSKKENHFIWRN
HPEYPYLYATFCEIDKKKKDAKQQATFTLADPINHPLWVRFEERSGSNLNKYRILTEQLHTE
KLKKKLTVQLDRLIYPTESGGWEEKGKVDIVLLPSRQFYNQIFLDIEEKGKHAFTYKDESIK
FPLKGTLGGARVQFDRDHLRRYPHKVESGNVGRIYFNMTVNIEPTESPVSKSLKIHRDDFPK
VVNFKPKELTEWIKDSKGKKLKSGIESLEIGLRVMSIDLGQRQAAAASIFEVVDQKPDIEGK
LFFPIKGTELYAVHRASFNIKLPGETLVKSREVLRKAREDNLKLMNQKLNFLRNVLHFQQFE
DITEREKRVTKWISRQENSDVPLVYQDELIQIRELMYKPYKDWVAFLKQLHKRLEVEIGKEV
KHWRKSLSDGRKGLYGISLKNIDEIDRTRKFLLRWSLRPTEPGEVRRLEPGQRFAIDQLNHL
NALKEDRLKKMANTIIMHALGYCYDVRKKKWQAKNPACQIILFEDLSNYNPYEERSRFENSK
LMKWSRREIPRQVALQGEIYGLQVGEVGAQFSSRFHAKTGSPGIRCSVVTKEKLQDNRFFKN
LQREGRLTLDKIAVLKEGDLYPDKGGEKFISLSKDRKCVTTHADINAAQNLQKRFWTRTHGF
YKVYCKAYQVDGQTVYIPESKDQKQKIIEEFGEGYFILKDGVYEWVNAGKLKIKKGSSKQSS
SELVDSDILKDSFDLASELKGEKLMLYRDPSGNVFPSDKWMAAGVFFGKLERILISKLTNQY
SISTIEDDSSKQSMKRPAATKKAGQAKKKKGSYPYDVPDYAYPYDVPDYAYPYDVPDYA
BhCas12b GGSGGS-ABE8-Xten20 at D980
(SEQ ID NO: 137)

[chemical structure]

CAGATCCTTCATCCTGAAGATCGAGCCCAACGAGGAAGTGAAGAAAGGCCTCTGGAAAACCC
ACGAGGTGCTGAACCACGGAATCGCCTACTACATGAATATCCTGAAGCTGATCCGGCAAGAG
GCCATCTACGAGCACCACGAGCAGGACCCCAAGAATCCCAAGAAGGTGTCCAAGGCCGAGAT
CCAGGCCGAGCTGTGGGATTTCGTGCTGAAGATGCAGAAGTGCAACAGCTTCACACACGAGG
TGGACAAGGACGAGGTGTTCAACATCCTGAGAGAGCTGTACGAGGAACTGGTGCCCAGCAGC
GTGGAAAAGAAGGGCGAAGCCAACCAGCTGAGCAACAAGTTTCTGTACCCTCTGGTGGACCC
CAACAGCCAGTCTGGAAAGGGAACAGCCAGCAGCGGCAGAAAGCCCAGATGGTACAACCTGA
AGATTGCCGGCGATCCCTCCTGGGAAGAAGAGAAGAAGAAGTGGGAAGAAGATAAGAAAAAG
GACCCGCTGGCCAAGATCCTGGGCAAGCTGGCTGAGTACGGACTGATCCCTCTGTTCATCCC
CTACACCGACAGCAACGAGCCCATCGTGAAAGAAATCAAGTGGATGGAAAAGTCCCGGAACC
AGAGCGTGCGGCGGCTGGATAAGGACATGTTCATTCAGGCCCTGGAACGGTTCCTGAGCTGG
GAGAGCTGGAACCTGAAAGTGAAAGAGGAATACGAGAAGGTCGAGAAAGAGTACAAGACCCT
GGAAGAGAGGATCAAAGAGGACATCCAGGCTCTGAAGGCTCTGGAACAGTATGAGAAAGAGC
GGCAAGAACAGCTGCTGCGGGACACCCTGAACACCAACGAGTACCGGCTGAGCAAGAGAGGC
CTTAGAGGCTGGCGGGAAATCATCCAGAAATGGCTGAAAATGGACGAGAACGAGCCCTCCGA
GAAGTACCTGGAAGTGTTCAAGGACTACCAGCGGAAGCACCCTAGAGAGGCCGGCGATTACA
GCGTGTACGAGTTCCTGTCCAAGAAAGAGAACCACTTCATCTGGCGGAATCACCCTGAGTAC
CCCTACCTGTACGCCACCTTCTGCGAGATCGACAAGAAAAAGAAGGACGCCAAGCAGCAGGC
CACCTTCACACTGGCCGATCCTATCAATCACCCTCTGTGGGTCCGATTCGAGGAAAGAAGCG
GCAGCAACCTGAACAAGTACAGAATCCTGACCGAGCAGCTGCACACCGAGAAGCTGAAGAAA
AAGCTGACAGTGCAGCTGGACCGGCTGATCTACCCTACAGAATCTGGCGGCTGGGAAGAGAA
GGGCAAAGTGGACATTGTGCTGCTGCCCAGCCGGCAGTTCTACAACCAGATCTTCCTGGACA
TCGAGGAAAAGGGCAAGCACGCCTTCACCTACAAGGATGAGAGCATCAAGTTCCCTCTGAAG
GGCACACTCGGCGGAGCCAGAGTGCAGTTCGACAGAGATCACCTGAGAAGATACCCTCACAA
GGTGGAAAGCGGCAACGTGGGCAGAATCTACTTCAACATGACCGTGAACATCGAGCCTACAG
AGTCCCCAGTGTCCAAGTCTCTGAAGATCCACCGGGACGACTTCCCCAAGGTGGTCAACTTC
AAGCCCAAAGAACTGACCGAGTGGATCAAGGACAGCAAGGGCAAGAAACTGAAGTCCGGCAT
CGAGTCCCTGGAAATCGGCCTGAGAGTGATGAGCATCGACCTGGGACAGAGACAGGCCGCTG
CCGCCTCTATTTTCGAGGTGGTGGATCAGAAGCCCGACATCGAAGGCAAGCTGTTTTTCCCA
ATCAAGGGCACCGAGCTGTATGCCGTGCACAGAGCCAGCTTCAACATCAAGCTGCCCGGCGA
GACACTGGTCAAGAGCAGAGAAGTGCTGCGGAAGGCCAGAGAGGACAATCTGAAACTGATGA
ACCAGAAGCTCAACTTCCTGCGGAACGTGCTGCACTTCCAGCAGTTCGAGGACATCACCGAG
AGAGAGAAGCGGGTCACCAAGTGGATCAGCAGACAAGAGAACAGCGACGTGCCCCTGGTGTA
CCAGGATGAGCTGATCCAGATCCGCGAGCTGATGTACAAGCCTTACAAGGACTGGGTCGCCT
TCCTGAAGCAGCTCCACAAGAGACTGGAAGTCGAGATCGGCAAAGAAGTGAAGCACTGGCGG
AAGTCCCTGAGCGACGGAAGAAAGGGCCTGTACGGCATCTCCCTGAAGAACATCGACGAGAT
CGATCGGACCCGGAAGTTCCTGCTGAGATGGTCCCTGAGGCCTACCGAACCTGGCGAAGTGC
GTAGACTGGAACCCGGCCAGAGATTCGCCATCGACCAGCTGAATCACCTGAACGCCCTGAAA
GAAGATCGGCTGAAGAAGATGGCCAACACCATCATCATGCACGCCCTGGGCTACTGCTACGA
CGTGCGGAAGAAGAAATGGCAGGCTAAGAACCCCGCCTGCCAGATCATCCTGTTCGAGGATC
TGAGCAACTACAACCCCTACGAGGAAAGGTCCCGCTTCGAGAACAGCAAGCTCATGAAGTGG
TCCAGACGCGAGATCCCCAGACAGGTTGCACTGCAGGGCGAGATCTATGGCCTGCAAGTGGG
AGAAGTGGGCGCTCAGTTCAGCAGCAGATTCCACGCCAAGACAGGCAGCCCTGGCATCAGAT
GTAGCGTCGTGACCAAAGAGAAGCTGCAGGACAATCGGTTCTTCAAGAATCTGCAGAGAGAG
GGCAGACTGACCCTGGACAAAATCGCCGTGCTGAAAGAGGGCGATCTGTACCCAGACAAAGG
CGGCGAGAAGTTCATCAGCCTGAGCAAGGATCGGAAGTGCGTGACCACACACGCCGACATCA
ACGCCGCTCAGAACCTGCAGAAGCGGTTCTGGACAAGAACCCACGGCTTCTACAAGGTGTAC

[chemical structure]

[chemical structure]

[chemical structure]

[chemical structure]

[chemical structure]

[chemical structure]

[chemical structure]

[chemical structure]

[chemical structure]

CCTGGCACAAGCGAGAGCGCCACCCCTGAGAGCTCTGGCGGCCAGACCGTGTACATCCCTGA
GAGCAAGGACCAGAAGCAGAAGATCATCGAAGAGTTCGGCGAGGGCTACTTCATTCTGAAGG
ACGGGGTGTACGAATGGGTCAACGCCGGCAAGCTGAAAATCAAGAAGGGCAGCTCCAAGCAG
AGCAGCAGCGAGCTGGTGGATAGCGACATCCTGAAAGACAGCTTCGACCTGGCCTCCGAGCT
GAAAGGCGAAAAGCTGATGCTGTACAGGGACCCCAGCGGCAATGTGTTCCCCAGCGACAAAT
GGATGGCCGCTGGCGTGTTCTTCGGAAAGCTGGAACGCATCCTGATCAGCAAGCTGACCAAC
CAGTACTCCATCAGCACCATCGAGGACGACAGCAGCAAGCAGTCTATGAAAAGGCCGGCGGC

[chemical structure]

ACGCTTATCCCTACGACGTGCCTGATTATGCATACCCATATGATGTCCCCGACTATGCCTAA
(SEQ ID NO: 138)
MAPKKKRKVGIHGVPAAATRSFILKIEPNEEVKKGLWKTHEVLNHGIAYYMNILKLIRQEAI
YEHHEQDPKNPKKVSKAEIQAELWDEVLKMQKCNSFTHEVDKDEVFNILRELYEELVPSSVE
KKGEANQLSNKFLYPLVDPNSQSGKGTASSGRKPRWYNLKIAGDPSWEEEKKKWEEDKKKDP
LAKILGKLAEYGLIPLFIPYTDSNEPIVKEIKWMEKSRNQSVRRLDKDMFIQALERFLSWES
WNLKVKEEYEKVEKEYKTLEERIKEDIQALKALEQYEKERQEQLLRDTLNTNEYRLSKRGLR
GWREIIQKWLKMDENEPSEKYLEVFKDYQRKHPREAGDYSVYEFLSKKENHFIWRNHPEYPY
LYATFCEIDKKKKDAKQQATFTLADPINHPLWVRFEERSGSNLNKYRILTEQLHTEKLKKKL
TVQLDRLIYPTESGGWEEKGKVDIVLLPSRQFYNQIFLDIEEKGKHAFTYKDESIKFPLKGT
LGGARVQFDRDHLRRYPHKVESGNVGRIYFNMTVNIEPTESPVSKSLKIHRDDFPKVVNFKP
KELTEWIKDSKGKKLKSGIESLEIGLRVMSIDLGQRQAAAASIFEVVDQKPDIEGKLFFPIK
GTELYAVHRASFNIKLPGETLVKSREVLRKAREDNLKLMNQKLNFLRNVLHFQQFEDITERE
KRVTKWISRQENSDVPLVYQDELIQIRELMYKPYKDWVAFLKQLHKRLEVEIGKEVKHWRKS
LSDGRKGLYGISLKNIDEIDRTRKFLLRWSLRPTEPGEVRRLEPGQRFAIDQLNHLNALKED
RLKKMANTIIMHALGYCYDVRKKKWQAKNPACQIILFEDLSNYNPYEERSRFENSKLMKWSR
REIPRQVALQGEIYGLQVGEVGAQFSSRFHAKTGSPGIRCSVVTKEKLQDNRFFKNLQREGR
LTLDKIAVLKEGDLYPDKGGEKFISLSKDRKCVTTHADINAAQNLQKRFWTRTHGFYKVYCK
AYQVDGGSGGSSEVEFSHEYWMRHALTLAKRARDEREVPVGAVLVLNNRVIGEGWNRAIGLH
DPTAHAEIMALRQGGLVMQNYRLYDATLYVTFEPCVMCAGAMIHSRIGRVVFGVRNAKTGAA
GSLMDVLHHPGMNHRVEITEGILADECAALLCRFFRMPRRVFNAQKKAQSSTDGSSGSETPG
TSESATPESSGGQTVYIPESKDQKQKIIEEFGEGYFILKDGVYEWVNAGKLKIKKGSSKQSS
SELVDSDILKDSFDLASELKGEKLMLYRDPSGNVFPSDKWMAAGVFFGKLERILISKLTNQY
SISTIEDDSSKQSMKRPAATKKAGQAKKKKGSYPYDVPDYAYPYDVPDYAYPYDVPDYA
BhCas12b GGSGGS-ABE8-Xten20 at K1019
(SEQ ID NO: 139)

[chemical structure]

CAGATCCTTCATCCTGAAGATCGAGCCCAACGAGGAAGTGAAGAAAGGCCTCTGGAAAACCC
ACGAGGTGCTGAACCACGGAATCGCCTACTACATGAATATCCTGAAGCTGATCCGGCAAGAG
GCCATCTACGAGCACCACGAGCAGGACCCCAAGAATCCCAAGAAGGTGTCCAAGGCCGAGAT
CCAGGCCGAGCTGTGGGATTTCGTGCTGAAGATGCAGAAGTGCAACAGCTTCACACACGAGG
TGGACAAGGACGAGGTGTTCAACATCCTGAGAGAGCTGTACGAGGAACTGGTGCCCAGCAGC
GTGGAAAAGAAGGGCGAAGCCAACCAGCTGAGCAACAAGTTTCTGTACCCTCTGGTGGACCC
CAACAGCCAGTCTGGAAAGGGAACAGCCAGCAGCGGCAGAAAGCCCAGATGGTACAACCTGA
AGATTGCCGGCGATCCCTCCTGGGAAGAAGAGAAGAAGAAGTGGGAAGAAGATAAGAAAAAG
GACCCGCTGGCCAAGATCCTGGGCAAGCTGGCTGAGTACGGACTGATCCCTCTGTTCATCCC
CTACACCGACAGCAACGAGCCCATCGTGAAAGAAATCAAGTGGATGGAAAAGTCCCGGAACC
AGAGCGTGCGGCGGCTGGATAAGGACATGTTCATTCAGGCCCTGGAACGGTTCCTGAGCTGG
GAGAGCTGGAACCTGAAAGTGAAAGAGGAATACGAGAAGGTCGAGAAAGAGTACAAGACCCT
GGAAGAGAGGATCAAAGAGGACATCCAGGCTCTGAAGGCTCTGGAACAGTATGAGAAAGAGC
GGCAAGAACAGCTGCTGCGGGACACCCTGAACACCAACGAGTACCGGCTGAGCAAGAGAGGC
CTTAGAGGCTGGCGGGAAATCATCCAGAAATGGCTGAAAATGGACGAGAACGAGCCCTCCGA
GAAGTACCTGGAAGTGTTCAAGGACTACCAGCGGAAGCACCCTAGAGAGGCCGGCGATTACA
GCGTGTACGAGTTCCTGTCCAAGAAAGAGAACCACTTCATCTGGCGGAATCACCCTGAGTAC
CCCTACCTGTACGCCACCTTCTGCGAGATCGACAAGAAAAAGAAGGACGCCAAGCAGCAGGC
CACCTTCACACTGGCCGATCCTATCAATCACCCTCTGTGGGTCCGATTCGAGGAAAGAAGCG
GCAGCAACCTGAACAAGTACAGAATCCTGACCGAGCAGCTGCACACCGAGAAGCTGAAGAAA
AAGCTGACAGTGCAGCTGGACCGGCTGATCTACCCTACAGAATCTGGCGGCTGGGAAGAGAA
GGGCAAAGTGGACATTGTGCTGCTGCCCAGCCGGCAGTTCTACAACCAGATCTTCCTGGACA
TCGAGGAAAAGGGCAAGCACGCCTTCACCTACAAGGATGAGAGCATCAAGTTCCCTCTGAAG
GGCACACTCGGCGGAGCCAGAGTGCAGTTCGACAGAGATCACCTGAGAAGATACCCTCACAA
GGTGGAAAGCGGCAACGTGGGCAGAATCTACTTCAACATGACCGTGAACATCGAGCCTACAG
AGTCCCCAGTGTCCAAGTCTCTGAAGATCCACCGGGACGACTTCCCCAAGGTGGTCAACTTC
AAGCCCAAAGAACTGACCGAGTGGATCAAGGACAGCAAGGGCAAGAAACTGAAGTCCGGCAT
CGAGTCCCTGGAAATCGGCCTGAGAGTGATGAGCATCGACCTGGGACAGAGACAGGCCGCTG
CCGCCTCTATTTTCGAGGTGGTGGATCAGAAGCCCGACATCGAAGGCAAGCTGTTTTTCCCA
ATCAAGGGCACCGAGCTGTATGCCGTGCACAGAGCCAGCTTCAACATCAAGCTGCCCGGCGA
GACACTGGTCAAGAGCAGAGAAGTGCTGCGGAAGGCCAGAGAGGACAATCTGAAACTGATGA
ACCAGAAGCTCAACTTCCTGCGGAACGTGCTGCACTTCCAGCAGTTCGAGGACATCACCGAG
AGAGAGAAGCGGGTCACCAAGTGGATCAGCAGACAAGAGAACAGCGACGTGCCCCTGGTGTA
CCAGGATGAGCTGATCCAGATCCGCGAGCTGATGTACAAGCCTTACAAGGACTGGGTCGCCT
TCCTGAAGCAGCTCCACAAGAGACTGGAAGTCGAGATCGGCAAAGAAGTGAAGCACTGGCGG
AAGTCCCTGAGCGACGGAAGAAAGGGCCTGTACGGCATCTCCCTGAAGAACATCGACGAGAT
CGATCGGACCCGGAAGTTCCTGCTGAGATGGTCCCTGAGGCCTACCGAACCTGGCGAAGTGC
GTAGACTGGAACCCGGCCAGAGATTCGCCATCGACCAGCTGAATCACCTGAACGCCCTGAAA
GAAGATCGGCTGAAGAAGATGGCCAACACCATCATCATGCACGCCCTGGGCTACTGCTACGA
CGTGCGGAAGAAGAAATGGCAGGCTAAGAACCCCGCCTGCCAGATCATCCTGTTCGAGGATC
TGAGCAACTACAACCCCTACGAGGAAAGGTCCCGCTTCGAGAACAGCAAGCTCATGAAGTGG
TCCAGACGCGAGATCCCCAGACAGGTTGCACTGCAGGGCGAGATCTATGGCCTGCAAGTGGG
AGAAGTGGGCGCTCAGTTCAGCAGCAGATTCCACGCCAAGACAGGCAGCCCTGGCATCAGAT
GTAGCGTCGTGACCAAAGAGAAGCTGCAGGACAATCGGTTCTTCAAGAATCTGCAGAGAGAG
GGCAGACTGACCCTGGACAAAATCGCCGTGCTGAAAGAGGGCGATCTGTACCCAGACAAAGG
CGGCGAGAAGTTCATCAGCCTGAGCAAGGATCGGAAGTGCGTGACCACACACGCCGACATCA
ACGCCGCTCAGAACCTGCAGAAGCGGTTCTGGACAAGAACCCACGGCTTCTACAAGGTGTAC
TGCAAGGCCTACCAGGTGGACGGCCAGACCGTGTACATCCCTGAGAGCAAGGACCAGAAGCA
GAAGATCATCGAAGAGTTCGGCGAGGGCTACTTCATTCTGAAGGACGGGGTGTACGAATGGG

[chemical structure]

[chemical structure]

[chemical structure]

[chemical structure]

[chemical structure]

[chemical structure]

[chemical structure]

[chemical structure]

[chemical structure]

CAAGCGAGAGCGCCACCCCTGAGAGCTCTGGCCTGAAAATCAAGAAGGGCAGCTCCAAGCAG
AGCAGCAGCGAGCTGGTGGATAGCGACATCCTGAAAGACAGCTTCGACCTGGCCTCCGAGCT
GAAAGGCGAAAAGCTGATGCTGTACAGGGACCCCAGCGGCAATGTGTTCCCCAGCGACAAAT
GGATGGCCGCTGGCGTGTTCTTCGGAAAGCTGGAACGCATCCTGATCAGCAAGCTGACCAAC
CAGTACTCCATCAGCACCATCGAGGACGACAGCAGCAAGCAGTCTATGAAAAGGCCGGCGGC

[chemical structure]

ACGCTTATCCCTACGACGTGCCTGATTATGCATACCCATATGATGTCCCCGACTATGCCTAA
(SEQ ID NO: 140)
MAPKKKRKVGIHGVPAAATRSFILKIEPNEEVKKGLWKTHEVLNHGIAYYMNILKLIRQEAI
YEHHEQDPKNPKKVSKAEIQAELWDFVLKMQKCNSFTHEVDKDEVFNILRELYEELVPSSVE
KKGEANQLSNKFLYPLVDPNSQSGKGTASSGRKPRWYNLKIAGDPSWEEEKKKWEEDKKKDP
LAKILGKLAEYGLIPLFIPYTDSNEPIVKEIKWMEKSRNQSVRRLDKDMFIQALERFLSWES
WNLKVKEEYEKVEKEYKTLEERIKEDIQALKALEQYEKERQEQLLRDTLNTNEYRLSKRGLR
GWREIIQKWLKMDENEPSEKYLEVFKDYQRKHPREAGDYSVYEFLSKKENHFIWRNHPEYPY
LYATFCEIDKKKKDAKQQATFTLADPINHPLWVRFEERSGSNLNKYRILTEQLHTEKLKKKL
TVOLDRLIYPTESGGWEEKGKVDIVLLPSRQFYNQIFLDIEEKGKHAFTYKDESIKFPLKGT
LGGARVQFDRDHLRRYPHKVESGNVGRIYFNMTVNIEPTESPVSKSLKIHRDDFPKVVNFKP
KELTEWIKDSKGKKLKSGIESLEIGLRVMSIDLGQRQAAAASIFEVVDQKPDIEGKLFFPIK
GTELYAVHRASFNIKLPGETLVKSREVLRKAREDNLKLMNQKLNFLRNVLHFQQFEDITERE
KRVTKWISRQENSDVPLVYQDELIQIRELMYKPYKDWVAFLKQLHKRLEVEIGKEVKHWRKS
LSDGRKGLYGISLKNIDEIDRTRKFLLRWSLRPTEPGEVRRLEPGQRFAIDQLNHLNALKED
RLKKMANTIIMHALGYCYDVRKKKWQAKNPACQIILFEDLSNYNPYEERSRFENSKLMKWSR
REIPRQVALQGEIYGLQVGEVGAQFSSRFHAKTGSPGIRCSVVTKEKLQDNRFFKNLQREGR
LTLDKIAVLKEGDLYPDKGGEKFISLSKDRKCVTTHADINAAQNLQKRFWTRTHGFYKVYCK
AYQVDGQTVYIPESKDQKQKIIEEFGEGYFILKDGVYEWVNAGKGGSGGSSEVEFSHEYWMR
HALTLAKRARDEREVPVGAVLVLNNRVIGEGWNRAIGLHDPTAHAEIMALRQGGLVMQNYRL
YDATLYVTFEPCVMCAGAMIHSRIGRVVFGVRNAKTGAAGSLMDVLHHPGMNHRVEITEGIL
ADECAALLCRFFRMPRRVFNAQKKAQSSTDGSSGSETPGTSESATPESSGLKIKKGSSKQSS
SELVDSDILKDSFDLASELKGEKLMLYRDPSGNVFPSDKWMAAGVFFGKLERILISKLTNQY
SISTIEDDSSKQSMKRPAATKKAGQAKKKKGSYPYDVPDYAYPYDVPDYAYPYDVPDYA

[0410] For the sequences above, the Kozak sequence is bolded and underlined; marks the N-terminal nuclear localization signal (NLS); lower case characters denote the GGGSGGS linker (SEQ ID NO: 141); [symbol] marks the sequence encoding ABE8, unmodified sequence encodes BhCas12b; double underling denotes the Xten20 linker; single underlining denotes the C-terminal NLS; [symbol] denotes the GS linker; and italicized characters represent the coding sequence of the 3× hemagglutinin (HA) tag.

### Guide Polynucleotides

[0411] In an embodiment, the guide polynucleotide is a guide RNA. An RNA/Cas complex can assist in “guiding” Cas protein to a target DNA. Cas9/crRNA/tracrRNA endonucleolytically cleaves linear or circular dsDNA target complementary to the spacer. The target strand not complementary to crRNA is first cut endonucleolytically, then trimmed 3′-5′ exonucleolytically. In nature, DNA-binding and cleavage typically requires protein and both RNAs. However, single guide RNAs (“sgRNA,” or simply “gNRA”) can be engineered so as to incorporate aspects of both the crRNA and tracrRNA into a single RNA species. See, e.g., Jinek M. et al., Science 337:816-821(2012), the entire contents of which is hereby incorporated by reference. Cas9 recognizes a short motif in the CRISPR repeat sequences (the PAM or protospacer adjacent motif) to help distinguish self versus non-self. Cas9 nuclease sequences and structures are well known to those of skill in the art (see e.g., “Complete genome sequence of an M1 strain of Streptococcus pyogenes.” Ferretti, J. J. et al., Natl. Acad. Sci. U.S.A. 98:4658-4663(2001); “CRISPR RNA maturation by trans-encoded small RNA and host factor RNase III.” Deltcheva E. et al., Nature 471:602-607(2011); and “Programmable dual-RNA-guided DNA endonuclease in adaptive bacterial immunity.” Jinek M. et al, Science 337:816-821(2012), the entire contents of each of which are incorporated herein by reference). Cas9 orthologs have been described in various species, including, but not limited to, S. pyogenes and S. thermophilus. Additional suitable Cas9 nucleases and sequences can be apparent to those of skill in the art based on this disclosure, and such Cas9 nucleases and sequences include Cas9 sequences from the organisms and loci disclosed in Chylinski, Rhun, and Charpentier, “The tracrRNA and Cas9 families of type II CRISPR-Cas immunity systems” (2013) RNA Biology 10:5, 726-737; the entire contents of which are incorporated herein by reference. In some embodiments, a Cas9 nuclease has an inactive (e.g., an inactivated) DNA cleavage domain, that is, the Cas9 is a nickase.

[0412] In some embodiments, the guide polynucleotide is at least one single guide RNA (“sgRNA” or “gNRA”). In some embodiments, the guide polynucleotide is at least one tracrRNA. In some embodiments, the guide polynucleotide does not require PAM sequence to guide the polynucleotide-programmable DNA-binding domain (e.g., Cas9 or Cpf1) to the target nucleotide sequence.

[0413] The polynucleotide programmable nucleotide binding domain (e.g., a CRISPR-derived domain) of the base editors disclosed herein can recognize a target polynucleotide sequence by associating with a guide polynucleotide. A guide polynucleotide (e.g., gRNA) is typically single-stranded and can be programmed to site-specifically bind (i.e., via complementary base pairing) to a target sequence of a polynucleotide, thereby directing a base editor that is in conjunction with the guide nucleic acid to the target sequence. A guide polynucleotide can be DNA. A guide polynucleotide can be RNA. In some embodiments, the guide polynucleotide comprises natural nucleotides (e.g., adenosine). In some embodiments, the guide polynucleotide comprises non-natural (or unnatural) nucleotides (e.g., peptide nucleic acid or nucleotide analogs). In some embodiments, the targeting region of a guide nucleic acid sequence can be at least 15, 16, 17, 18, 19, 20, 21, 22, 23, 24, 25, 26, 27, 28, 29, or 30 nucleotides in length. A targeting region of a guide nucleic acid can be between 10-30 nucleotides in length, or between 15-25 nucleotides in length, or between 15-20 nucleotides in length.

[0414] In some embodiments, a guide polynucleotide comprises two or more individual polynucleotides, which can interact with one another via for example complementary base pairing (e.g., a dual guide polynucleotide). For example, a guide polynucleotide can comprise a CRISPR RNA (crRNA) and a trans-activating CRISPR RNA (tracrRNA). For example, a guide polynucleotide can comprise one or more trans-activating CRISPR RNA (tracrRNA).

[0415] In type II CRISPR systems, targeting of a nucleic acid by a CRISPR protein (e.g., Cas9) typically requires complementary base pairing between a first RNA molecule (crRNA) comprising a sequence that recognizes the target sequence and a second RNA molecule (trRNA) comprising repeat sequences which forms a scaffold region that stabilizes the guide RNA-CRISPR protein complex. Such dual guide RNA systems can be employed as a guide polynucleotide to direct the base editors disclosed herein to a target polynucleotide sequence.

[0416] In some embodiments, the base editor provided herein utilizes a single guide polynucleotide (e.g., gRNA). In some embodiments, the base editor provided herein utilizes a dual guide polynucleotide (e.g., dual gRNAs). In some embodiments, the base editor provided herein utilizes one or more guide polynucleotide (e.g., multiple gRNA). In some embodiments, a single guide polynucleotide is utilized for different base editors described herein. For example, a single guide polynucleotide can be utilized for a cytidine base editor and an adenosine base editor.

[0417] In other embodiments, a guide polynucleotide can comprise both the polynucleotide targeting portion of the nucleic acid and the scaffold portion of the nucleic acid in a single molecule (i.e., a single-molecule guide nucleic acid). For example, a single-molecule guide polynucleotide can be a single guide RNA (sgRNA or gRNA). Herein the term guide polynucleotide sequence contemplates any single, dual or multi-molecule nucleic acid capable of interacting with and directing a base editor to a target polynucleotide sequence.

[0418] Typically, a guide polynucleotide (e.g., crRNA/trRNA complex or a gRNA) comprises a “polynucleotide-targeting segment” that includes a sequence capable of recognizing and binding to a target polynucleotide sequence, and a “protein-binding segment” that stabilizes the guide polynucleotide within a polynucleotide programmable nucleotide binding domain component of a base editor. In some embodiments, the polynucleotide targeting segment of the guide polynucleotide recognizes and binds to a DNA polynucleotide, thereby facilitating the editing of a base in DNA. In other embodiments, the polynucleotide targeting segment of the guide polynucleotide recognizes and binds to an RNA polynucleotide, thereby facilitating the editing of a base in RNA. Herein a “segment” refers to a section or region of a molecule, e.g., a contiguous stretch of nucleotides in the guide polynucleotide. A segment can also refer to a region/section of a complex such that a segment can comprise regions of more than one molecule. For example, where a guide polynucleotide comprises multiple nucleic acid molecules, the protein-binding segment of can include all or a portion of multiple separate molecules that are for instance hybridized along a region of complementarity. In some embodiments, a protein-binding segment of a DNA-targeting RNA that comprises two separate molecules can comprise (i) base pairs 40-75 of a first RNA molecule that is 100 base pairs in length; and (ii) base pairs 10-25 of a second RNA molecule that is 50 base pairs in length. The definition of “segment,” unless otherwise specifically defined in a particular context, is not limited to a specific number of total base pairs, is not limited to any particular number of base pairs from a given RNA molecule, is not limited to a particular number of separate molecules within a complex, and can include regions of RNA molecules that are of any total length and can include regions with complementarity to other molecules.

[0419] A guide RNA or a guide polynucleotide can comprise two or more RNAs, e.g., CRISPR RNA (crRNA) and transactivating crRNA (tracrRNA). A guide RNA or a guide polynucleotide can sometimes comprise a single-chain RNA, or single guide RNA (sgRNA) formed by fusion of a portion (e.g., a functional portion) of crRNA and tracrRNA. A guide RNA or a guide polynucleotide can also be a dual RNA comprising a crRNA and a tracrRNA. Furthermore, a crRNA can hybridize with a target DNA.

[0420] As discussed above, a guide RNA or a guide polynucleotide can be an expression product. For example, a DNA that encodes a guide RNA can be a vector comprising a sequence coding for the guide RNA. A guide RNA or a guide polynucleotide can be transferred into a cell by transfecting the cell with an isolated guide RNA or plasmid DNA comprising a sequence coding for the guide RNA and a promoter. A guide RNA or a guide polynucleotide can also be transferred into a cell in other way, such as using virus-mediated gene delivery.

[0421] A guide RNA or a guide polynucleotide can be isolated. For example, a guide RNA can be transfected in the form of an isolated RNA into a cell or organism. A guide RNA can be prepared by in vitro transcription using any in vitro transcription system known in the art. A guide RNA can be transferred to a cell in the form of isolated RNA rather than in the form of plasmid comprising encoding sequence for a guide RNA.

[0422] A guide RNA or a guide polynucleotide can comprise three regions: a first region at the 5′ end that can be complementary to a target site in a chromosomal sequence, a second internal region that can form a stem loop structure, and a third 3′ region that can be single-stranded. A first region of each guide RNA can also be different such that each guide RNA guides a fusion protein to a specific target site. Further, second and third regions of each guide RNA can be identical in all guide RNAs.

[0423] A first region of a guide RNA or a guide polynucleotide can be complementary to sequence at a target site in a chromosomal sequence such that the first region of the guide RNA can base pair with the target site. In some embodiments, a first region of a guide RNA can comprise from or from about 10 nucleotides to 25 nucleotides (i.e., from 10 nucleotides to nucleotides; or from about 10 nucleotides to about 25 nucleotides; or from 10 nucleotides to about 25 nucleotides; or from about 10 nucleotides to 25 nucleotides) or more. For example, a region of base pairing between a first region of a guide RNA and a target site in a chromosomal sequence can be or can be about 10, 11, 12, 13, 14, 15, 16, 17, 18, 19, 20, 22, 23, 24, 25, or more nucleotides in length. Sometimes, a first region of a guide RNA can be or can be about 19, 20, or 21 nucleotides in length.

[0424] A guide RNA or a guide polynucleotide can also comprise a second region that forms a secondary structure. For example, a secondary structure formed by a guide RNA can comprise a stem (or hairpin) and a loop. A length of a loop and a stem can vary. For example, a loop can range from or from about 3 to 10 nucleotides in length, and a stem can range from or from about 6 to 20 base pairs in length. A stem can comprise one or more bulges of 1 to 10 or about 10 nucleotides. The overall length of a second region can range from or from about 16 to 60 nucleotides in length. For example, a loop can be or can be about 4 nucleotides in length and a stem can be or can be about 12 base pairs.

[0425] A guide RNA or a guide polynucleotide can also comprise a third region at the 3′ end that can be essentially single-stranded. For example, a third region is sometimes not complementarity to any chromosomal sequence in a cell of interest and is sometimes not complementarity to the rest of a guide RNA. Further, the length of a third region can vary. A third region can be more than or more than about 4 nucleotides in length. For example, the length of a third region can range from or from about 5 to 60 nucleotides in length.

[0426] A guide RNA or a guide polynucleotide can target any exon or intron of a gene target. In some embodiments, a guide can target exon 1 or 2 of a gene; in other embodiments, a guide can target exon 3 or 4 of a gene. A composition can comprise multiple guide RNAs that all target the same exon or in some embodiments, multiple guide RNAs that can target different exons. An exon and an intron of a gene can be targeted.

[0427] A guide RNA or a guide polynucleotide can target a nucleic acid sequence of or of about 20 nucleotides. A target nucleic acid can be less than or less than about 20 nucleotides. A target nucleic acid can be at least or at least about 5, 10, 15, 16, 17, 18, 19, 20, 21, 22, 23, 24, 25, 30, or anywhere between 1-100 nucleotides in length. A target nucleic acid can be at most or at most about 5, 10, 15, 16, 17, 18, 19, 20, 21, 22, 23, 24, 25, 30, 40, 50, or anywhere between 1-100 nucleotides in length. A target nucleic acid sequence can be or can be about 20 bases immediately 5′ of the first nucleotide of the PAM. A guide RNA can target a nucleic acid sequence. A target nucleic acid can be at least or at least about 1-10, 1-20, 1-30, 1-40, 1-50, 1-60, 1-70, 1-80, 1-90, or 1-100 nucleotides.

[0428] A guide polynucleotide, for example, a guide RNA, can refer to a nucleic acid that can hybridize to another nucleic acid, for example, the target nucleic acid or protospacer in a genome of a cell. A guide polynucleotide can be RNA. A guide polynucleotide can be DNA. The guide polynucleotide can be programmed or designed to bind to a sequence of nucleic acid site-specifically. A guide polynucleotide can comprise a polynucleotide chain and can be called a single guide polynucleotide. A guide polynucleotide can comprise two polynucleotide chains and can be called a double guide polynucleotide. A guide RNA can be introduced into a cell or embryo as an RNA molecule. For example, an RNA molecule can be transcribed in vitro and/or can be chemically synthesized. An RNA can be transcribed from a synthetic DNA molecule, e.g., a gBlocks® gene fragment. A guide RNA can then be introduced into a cell or embryo as an RNA molecule. A guide RNA can also be introduced into a cell or embryo in the form of a non-RNA nucleic acid molecule, e.g., DNA molecule. For example, a DNA encoding a guide RNA can be operably linked to promoter control sequence for expression of the guide RNA in a cell or embryo of interest. A RNA coding sequence can be operably linked to a promoter sequence that is recognized by RNA polymerase III (Pol III). Plasmid vectors that can be used to express guide RNA include, but are not limited to, px330 vectors and px333 vectors. In some embodiments, a plasmid vector (e.g., px333 vector) can comprise at least two guide RNA-encoding DNA sequences.

[0429] Methods for selecting, designing, and validating guide polynucleotides, e.g., guide RNAs and targeting sequences are described herein and known to those skilled in the art. For example, to minimize the impact of potential substrate promiscuity of a deaminase domain in the nucleobase editor system (e.g., an AID domain), the number of residues that could unintentionally be targeted for deamination (e.g., off-target C residues that could potentially reside on ssDNA within the target nucleic acid locus) may be minimized. In addition, software tools can be used to optimize the gRNAs corresponding to a target nucleic acid sequence, e.g., to minimize total off-target activity across the genome. For example, for each possible targeting domain choice using S. pyogenes Cas9, all off-target sequences (preceding selected PAMs, e.g., NAG or NGG) may be identified across the genome that contain up to certain number (e.g., 1, 2, 3, 4, 5, 6, 7, 8, 9, or 10) of mismatched base-pairs. First regions of gRNAs complementary to a target site can be identified, and all first regions (e.g., crRNAs) can be ranked according to its total predicted off-target score; the top-ranked targeting domains represent those that are likely to have the greatest on-target and the least off-target activity. Candidate targeting gRNAs can be functionally evaluated by using methods known in the art and/or as set forth herein.

[0430] As a non-limiting example, target DNA hybridizing sequences in crRNAs of a guide RNA for use with Cas9s may be identified using a DNA sequence searching algorithm. gRNA design may be carried out using custom gRNA design software based on the public tool cas-offinder as described in Bae S., Park J., & Kim J.-S. Cas-OFFinder: A fast and versatile algorithm that searches for potential off-target sites of Cas9 RNA-guided endonucleases. Bioinformatics 30, 1473-1475 (2014). This software scores guides after calculating their genome-wide off-target propensity. Typically matches ranging from perfect matches to 7 mismatches are considered for guides ranging in length from 17 to 24. Once the off-target sites are computationally-determined, an aggregate score is calculated for each guide and summarized in a tabular output using a web-interface. In addition to identifying potential target sites adjacent to PAM sequences, the software also identifies all PAM adjacent sequences that differ by 1, 2, 3 or more than 3 nucleotides from the selected target sites. Genomic DNA sequences for a target nucleic acid sequence, e.g., a target gene may be obtained and repeat elements may be screened using publicly available tools, for example, the RepeatMasker program. RepeatMasker searches input DNA sequences for repeated elements and regions of low complexity. The output is a detailed annotation of the repeats present in a given query sequence.

[0431] Following identification, first regions of guide RNAs, e.g., crRNAs, may be ranked into tiers based on their distance to the target site, their orthogonality and presence of 5′ nucleotides for close matches with relevant PAM sequences (for example, a 5′ G based on identification of close matches in the human genome containing a relevant PAM e.g., NGG PAM for S. pyogenes, NNGRRT or NNGRRV PAM for S. aureus). As used herein, orthogonality refers to the number of sequences in the human genome that contain a minimum number of mismatches to the target sequence. A “high level of orthogonality” or “good orthogonality” may, for example, refer to 20-mer targeting domains that have no identical sequences in the human genome besides the intended target, nor any sequences that contain one or two mismatches in the target sequence. Targeting domains with good orthogonality may be selected to minimize off-target DNA cleavage.

[0432] In some embodiments, a reporter system may be used for detecting base-editing activity and testing candidate guide polynucleotides. In some embodiments, a reporter system may comprise a reporter gene-based assay where base editing activity leads to expression of the reporter gene. For example, a reporter system may include a reporter gene comprising a deactivated start codon, e.g., a mutation on the template strand from 3′-TAC-5′ to 3′-CAC-5′. Upon successful deamination of the target C, the corresponding mRNA will be transcribed as 5′-AUG-3′ instead of 5′-GUG-3′, enabling the translation of the reporter gene. Suitable reporter genes will be apparent to those of skill in the art. Non-limiting examples of reporter genes include gene encoding green fluorescence protein (GFP), red fluorescence protein (RFP), luciferase, secreted alkaline phosphatase (SEAP), or any other gene whose expression are detectable and apparent to those skilled in the art. The reporter system can be used to test many different gRNAs, e.g., in order to determine which residue(s) with respect to the target DNA sequence the respective deaminase will target. sgRNAs that target non-template strand can also be tested in order to assess off-target effects of a specific base editing protein, e.g., a Cas9 deaminase fusion protein. In some embodiments, such gRNAs can be designed such that the mutated start codon will not be base-paired with the gRNA. The guide polynucleotides can comprise standard ribonucleotides, modified ribonucleotides (e.g., pseudouridine), ribonucleotide isomers, and/or ribonucleotide analogs. In some embodiments, the guide polynucleotide can comprise at least one detectable label. The detectable label can be a fluorophore (e.g., FAM, TMR, Cy3, Cy5, Texas Red, Oregon Green, Alexa Fluors, Halo tags, or suitable fluorescent dye), a detection tag (e.g., biotin, digoxigenin, and the like), quantum dots, or gold particles.

[0433] The guide polynucleotides can be synthesized chemically, synthesized enzymatically, or a combination thereof. For example, the guide RNA can be synthesized using standard phosphoramidite-based solid-phase synthesis methods. Alternatively, the guide RNA can be synthesized in vitro by operably linking DNA encoding the guide RNA to a promoter control sequence that is recognized by a phage RNA polymerase. Examples of suitable phage promoter sequences include T7, T3, SP6 promoter sequences, or variations thereof. In embodiments in which the guide RNA comprises two separate molecules (e.g., crRNA and tracrRNA), the crRNA can be chemically synthesized and the tracrRNA can be enzymatically synthesized.

[0434] In some embodiments, a base editor system may comprise multiple guide polynucleotides, e.g., gRNAs. For example, the gRNAs may target to one or more target loci (e.g., at least 1 gRNA, at least 2 gRNA, at least 5 gRNA, at least 10 gRNA, at least 20 gRNA, at least 30 g RNA, at least 50 gRNA) comprised in a base editor system. The multiple gRNA sequences can be tandemly arranged and are preferably separated by a direct repeat.

[0435] A DNA sequence encoding a guide RNA or a guide polynucleotide can also be part of a vector. Further, a vector can comprise additional expression control sequences (e.g., enhancer sequences, Kozak sequences, polyadenylation sequences, transcriptional termination sequences, etc.), selectable marker sequences (e.g., GFP or antibiotic resistance genes such as puromycin), origins of replication, and the like. A DNA molecule encoding a guide RNA can also be linear. A DNA molecule encoding a guide RNA or a guide polynucleotide can also be circular.

[0436] In some embodiments, one or more components of a base editor system may be encoded by DNA sequences. Such DNA sequences may be introduced into an expression system, e.g., a cell, together or separately. For example, DNA sequences encoding a polynucleotide programmable nucleotide binding domain and a guide RNA may be introduced into a cell, each DNA sequence can be part of a separate molecule (e.g., one vector containing the polynucleotide programmable nucleotide binding domain coding sequence and a second vector containing the guide RNA coding sequence) or both can be part of a same molecule (e.g., one vector containing coding (and regulatory) sequence for both the polynucleotide programmable nucleotide binding domain and the guide RNA).

[0437] A guide polynucleotide can comprise one or more modifications to provide a nucleic acid with a new or enhanced feature. A guide polynucleotide can comprise a nucleic acid affinity tag. A guide polynucleotide can comprise synthetic nucleotide, synthetic nucleotide analog, nucleotide derivatives, and/or modified nucleotides.

[0438] In some embodiments, a gRNA or a guide polynucleotide can comprise modifications. A modification can be made at any location of a gRNA or a guide polynucleotide. More than one modification can be made to a single gRNA or a guide polynucleotide. A gRNA or a guide polynucleotide can undergo quality control after a modification. In some embodiments, quality control can include PAGE, HPLC, MS, or any combination thereof.

[0439] A modification of a gRNA or a guide polynucleotide can be a substitution, insertion, deletion, chemical modification, physical modification, stabilization, purification, or any combination thereof.

[0440] A gRNA or a guide polynucleotide can also be modified by 5′adenylate, 5′ guanosine-triphosphate cap, 5′N7-Methylguanosine-triphosphate cap, 5′triphosphate cap, 3′phosphate, 3′thiophosphate, 5′phosphate, 5′thiophosphate, Cis-Syn thymidine dimer, trimers, C12 spacer, C3 spacer, C6 spacer, dSpacer, PC spacer, rSpacer, Spacer 18, Spacer 9,3′-3′ modifications, 5′-5′ modifications, abasic, acridine, azobenzene, biotin, biotin BB, biotin TEG, cholesteryl TEG, desthiobiotin TEG, DNP TEG, DNP-X, DOTA, dT-Biotin, dual biotin, PC biotin, psoralen C2, psoralen C6, TINA, 3′DABCYL, black hole quencher 1, black hole quencer 2, DABCYL SE, dT-DABCYL, IRDye QC-1, QSY-21, QSY-35, QSY-7, QSY-9, carboxyl linker, thiol linkers, 2′-deoxyribonucleoside analog purine, 2′-deoxyribonucleoside analog pyrimidine, ribonucleoside analog, 2′-O-methyl ribonucleoside analog, sugar modified analogs, wobble/universal bases, fluorescent dye label, 2′-fluoro RNA, 2′-O-methyl RNA, methylphosphonate, phosphodiester DNA, phosphodiester RNA, phosphothioate DNA, phosphorothioate RNA, UNA, pseudouridine-5′-triphosphate, 5′-methylcytidine-5′-triphosphate, or any combination thereof.

[0441] In some embodiments, a modification is permanent. In other embodiments, a modification is transient. In some embodiments, multiple modifications are made to a gRNA or a guide polynucleotide. A gRNA or a guide polynucleotide modification can alter physiochemical properties of a nucleotide, such as their conformation, polarity, hydrophobicity, chemical reactivity, base-pairing interactions, or any combination thereof.

[0442] The PAM sequence can be any PAM sequence known in the art. Suitable PAM sequences include, but are not limited to, NGG, NGA, NGC, NGN, NGT, NGCG, NGAG, NGAN, NGNG, NGCN, NGCG, NGTN, NNGRRT, NNNRRT, NNGRR(N), TTTV, TYCV, TYCV, TATV, NNNNGATT, NNAGAAW, or NAAAAC. Y is a pyrimidine; N is any nucleotide base; W is A or T.

[0443] A modification can also be a phosphorothioate substitute. In some embodiments, a natural phosphodiester bond can be susceptible to rapid degradation by cellular nucleases and; a modification of internucleotide linkage using phosphorothioate (PS) bond substitutes can be more stable towards hydrolysis by cellular degradation. A modification can increase stability in a gRNA or a guide polynucleotide. A modification can also enhance biological activity. In some embodiments, a phosphorothioate enhanced RNA gRNA can inhibit RNase A, RNase T1, calf serum nucleases, or any combinations thereof. These properties can allow the use of PS-RNA gRNAs to be used in applications where exposure to nucleases is of high probability in vivo or in vitro. For example, phosphorothioate (PS) bonds can be introduced between the last 3-5 nucleotides at the 5′- or ″-end of a gRNA which can inhibit exonuclease degradation. In some embodiments, phosphorothioate bonds can be added throughout an entire gRNA to reduce attack by endonucleases.

[0444] Different Cas12b orthologs (e.g., BhCas12b, BvCas12b, and AaCas12b) use different scaffold sequences (also referred to as tracrRNA). In some embodiments, the scaffold sequence is optimized for use with a BhCas12b protein and has the following sequence: (where the T's are replaced by uridines (U's) in the actual gRNA).

BhCas12b sgRNA Scaffold (Underlined)+20 nt to 23 nt Guide Sequence (Denoted by Ns).

(SEQ ID NO: 142)
5′GTTCTGTCTTTTGGTCAGGACAACCGTCTAGCTATAAGTGCTGCAGGG
TGTGAGAAACTCCTATTGCTGGACGATGTCTCTTACGAGGCATTAGCACN
NNNNNNNNNNNNNNNNNNN-3′

[0445] In some embodiments, the scaffold sequence is optimized for use with a BvCas12b protein and has the following sequence: (where the T's are replaced by uridines (U's) in the actual gRNA).

BvCas12b sgRNA Scaffold (Underlined)+20 nt to 23 nt Guide Sequence (Denoted by Ns)

(SEQ ID NO: 143)
5′GACCTATAGGGTCAATGAATCTGTGCGTGTGCCATAAGTAATTAAAAA
TTACCCACCACAGGAGCACCTGAAAACAGGTGCTTGGCACNNNNNNNNNN
NNNNNNNNNN-3′

[0446] In some embodiments, the scaffold sequence is optimized for use with a AaCas12b protein and has the following sequence: (where the T's are replaced by uridines (U's) in the actual gRNA).

AaCas12b sgRNA Scaffold (Underlined)+20 nt to 23 nt Guide Sequence (Denoted by Ns)

(SEQ ID NO: 144)
5′GTCTAAAGGACAGAATTTTTCAACGGGTGTGCCAATGGCCACTTTCCA
GGTGGCAAAGCCCGTTGAACTTCTCAAAAAGAACGATCTGAGAAGTGGCA
CNNNNNNNNNNNNNNNNNNNN-3′

[0447] Thus, a skilled artisan can change the genomic target of the Cas protein specificity is partially determined by how specific the gRNA targeting sequence is for the genomic target compared to the rest of the genome.

### Protospacer Adjacent Motif

[0448] The term “protospacer adjacent motif (PAM)” or PAM-like motif refers to a 2-6 base pair DNA sequence immediately following the DNA sequence targeted by the Cas9 nuclease in the CRISPR bacterial adaptive immune system. In some embodiments, the PAM can be a 5′ PAM (i.e., located upstream of the 5′ end of the protospacer). In other embodiments, the PAM can be a 3′ PAM (i.e., located downstream of the 5′ end of the protospacer).

[0449] The PAM sequence is essential for target binding, but the exact sequence depends on a type of Cas protein.

[0450] A base editor provided herein can comprise a CRISPR protein-derived domain that is capable of binding a nucleotide sequence that contains a canonical or non-canonical protospacer adjacent motif (PAM) sequence. A PAM site is a nucleotide sequence in proximity to a target polynucleotide sequence. Some aspects of the disclosure provide for base editors comprising all or a portion of CRISPR proteins that have different PAM specificities.

[0451] For example, typically Cas9 proteins, such as Cas9 from S. pyogenes (spCas9), require a canonical NGG PAM sequence to bind a particular nucleic acid region, where the “N” in “NGG” is adenine (A), thymine (T), guanine (G), or cytosine (C), and the G is guanine. A PAM can be CRISPR protein-specific and can be different between different base editors comprising different CRISPR protein-derived domains. A PAM can be 5′ or 3′ of a target sequence. A PAM can be upstream or downstream of a target sequence. A PAM can be 1, 2, 3, 4, 5, 6, 7, 8, 9, 10 or more nucleotides in length. Often, a PAM is between 2-6 nucleotides in length. Several PAM variants are described in Table 1 below.

TABLE1
Cas9 proteins and corresponding PAM sequences

| Variant | PAM |
|---|---|
| spCas9 | NGG |
| spCas9-VRQR | NGA |
| spCas9-VRER | NGCG |
| xCas9 (sp) | NGN |
| saCas9 | NNGRRT |
| saCas9-KKH | NNNRRT |
| spCas9-MQKSER | NGCG |
| spCas9-MQKSER | NGCN |
| spCas9-LRKIQK | NGTN |
| spCas9-LRVSQK | NGTN |
| spCas9-LRVSQL | NGTN |
| spCas9-MQKFRAER | NGC |
| Cpf1 | 5′ (TTTV) |
| SpyMac | 5′-NAA-3′ |

[0452] In some embodiments, the PAM is NGC. In some embodiments, the NGC PAM is recognized by a Cas9 variant. In some embodiments, the NGC PAM variant includes one or more amino acid substitutions selected from D1135M, S1136Q, G1218K, E1219F, A1322R, D1332A, R1335E, and T1337R (collectively termed “MQKFRAER”).

[0453] In some embodiments, the PAM is NGT. In some embodiments, the NGT PAM is recognized by a Cas9 variant. In some embodiments, the NGT PAM variant is generated through targeted mutations at one or more residues 1335, 1337, 1135, 1136, 1218, and/or 1219. In some embodiments, the NGT PAM variant is created through targeted mutations at one or more residues 1219, 1335, 1337, 1218. In some embodiments, the NGT PAM variant is created through targeted mutations at one or more residues 1135, 1136, 1218, 1219, and 1335. In some embodiments, the NGT PAM variant is selected from the set of targeted mutations provided in Table 2 and Table 3 below.

TABLE 2
NGT PAM Variant Mutations at residues 1219, 1335, 1337, 1218

| Variant | E1219V | R1335Q | T1337 | G1218 |
|---|---|---|---|---|
| 1 | F | V | T | |
| 2 | F | V | R | |
| 3 | F | V | Q | |
| 4 | F | V | L | |
| 5 | F | V | T | R |
| 6 | F | V | R | R |
| 7 | F | V | Q | R |
| 8 | F | V | L | R |
| 9 | L | L | T | |
| 10 | L | L | R | |
| 11 | L | L | Q | |
| 12 | L | L | L | |
| 13 | F | I | T | |
| 14 | F | I | R | |
| 15 | F | I | Q | |
| 16 | F | I | L | |
| 17 | F | G | C | |
| 18 | H | L | N | |
| 19 | F | G | C | A |
| 20 | H | L | N | V |
| 21 | L | A | W | |
| 22 | L | A | F | |
| 23 | L | A | Y | |
| 24 | I | A | W | |
| 25 | I | A | F | |
| 26 | I | A | Y | |

TABLE 3
NGT PAM Variant Mutations at residues
1135, 1136, 1218, 1219, and 1335

| Variant | D1135L | S1136R | G1218S | E1219V | R1335Q |
|---|---|---|---|---|---|
| 27 | G | | | | |
| 28 | V | | | | |
| 29 | I | | | | |
| 30 | | A | | | |
| 31 | | W | | | |
| 32 | | H | | | |
| 33 | | K | | | |
| 34 | | | K | | |
| 35 | | | R | | |
| 36 | | | Q | | |
| 37 | | | T | | |
| 38 | | | N | | |
| 39 | | | | I | |
| 40 | | | | A | |
| 41 | | | | N | |
| 42 | | | | Q | |
| 43 | | | | G | |
| 44 | | | | L | |
| 45 | | | | S | |
| 46 | | | | T | |
| 47 | | | | | L |
| 48 | | | | | I |
| 49 | | | | | V |
| 50 | | | | | N |
| 51 | | | | | S |
| 52 | | | | | T |
| 53 | | | | | F |
| 54 | | | | | Y |
| 55 | N1286Q | I1331F | | | |

[0454] In some embodiments, the NGT PAM variant is selected from variant 5, 7, 28, 31, or 36 in Tables 2 and 3. In some embodiments, the variants have improved NGT PAM recognition.

[0455] In some embodiments, the NGT PAM variants have mutations at residues 1219, 1335, 1337, and/or 1218. In some embodiments, the NGT PAM variant is selected with mutations for improved recognition from the variants provided in Table 4 below.

TABLE 4
NGT PAM Variant Mutations at residues
1219, 1335, 1337, and 1218

| Variant | E1219V | R1335Q | T1337 | G1218 |
|---|---|---|---|---|
| 1 | F | V | T | |
| 2 | F | V | R | |
| 3 | F | V | Q | |
| 4 | F | V | L | |
| 5 | F | V | T | R |
| 6 | F | V | R | R |
| 7 | F | V | Q | R |
| 8 | F | V | L | R |

[0456] In some embodiments, base editors with specificity for NGT PAM may be generated as provided in Table 5 below.

TABLE5A
NGT PAM variants

| | NGTN | | | | | | | |
|---|---|---|---|---|---|---|---|---|
| | variant | D1135 | S1136 | G1218 | E1219 | A1322R | R1335 | T1337 |
| Variant 1 | LRKIQK | L | R | K | I | — | Q | K |
| Variant 2 | LRSVQK | L | R | S | V | — | Q | K |
| Variant 3 | LRSVQL | L | R | S | V | — | Q | L |
| Variant 4 | LRKIRQK | L | R | K | I | R | Q | K |
| Variant 5 | LRSVRQK | L | R | S | V | R | Q | K |
| Variant 6 | LRSVRQL | L | R | S | V | R | Q | L |

[0457] In some embodiments the NGTN variant is variant 1. In some embodiments, the NGTN variant is variant 2. In some embodiments, the NGTN variant is variant 3. In some embodiments, the NGTN variant is variant 4. In some embodiments, the NGTN variant is variant 5. In some embodiments, the NGTN variant is variant 6.

[0458] In some embodiments, the Cas9 domain is a Cas9 domain from Streptococcus pyogenes (SpCas9). In some embodiments, the SpCas9 domain is a nuclease active SpCas9, a nuclease inactive SpCas9 (SpCas9d), or a SpCas9 nickase (SpCas9n). In some embodiments, the SpCas9 comprises a D10X mutation, or a corresponding mutation in any of the amino acid sequences provided herein, as numbered in SEQ ID NO: 1, wherein Xis any amino acid except for D. In some embodiments, the SpCas9 comprises a D10A mutation, as numbered in SEQ ID NO: 1, or a corresponding mutation in any of the amino acid sequences provided herein. In some embodiments, the SpCas9 domain, the SpCas9d domain, or the SpCas9n domain can bind to a nucleic acid sequence having a non-canonical PAM. In some embodiments, the SpCas9 domain, the SpCas9d domain, or the SpCas9n domain can bind to a nucleic acid sequence having an NGG, a NGA, or a NGCG PAM sequence. In some embodiments, the SpCas9 domain comprises one or more of a D1135X, a R1335X, and a T1337X mutation, as numbered in SEQ ID NO: 1, or a corresponding mutation in any of the amino acid sequences provided herein, wherein X is any amino acid. In some embodiments, the SpCas9 domain comprises one or more of a D1136E, R1335Q, and T1337R mutation, as numbered in SEQ ID NO: 1, or a corresponding mutation in any of the amino acid sequences provided herein. In some embodiments, the SpCas9 domain comprises a D1135E, a R1335Q, and a T1337R mutation, as numbered in SEQ ID NO: 1, or corresponding mutations in any of the amino acid sequences provided herein. In some embodiments, the SpCas9 domain comprises one or more of a D1135X, a R1335X, and a T1337X mutation, as numbered in SEQ ID NO: 1, or a corresponding mutation in any of the amino acid sequences provided herein, wherein X is any amino acid. In some embodiments, the SpCas9 domain comprises one or more of a D1135V, a R1335Q, and a T1337R mutation, as numbered in SEQ ID NO: 1, or a corresponding mutation in any of the amino acid sequences provided herein. In some embodiments, the SpCas9 domain comprises a D1135V, a R1335Q, and a T1337R mutation, as numbered in SEQ ID NO: 1, or corresponding mutations in any of the amino acid sequences provided herein. In some embodiments, the SpCas9 domain comprises one or more of a D1135X, a G1218X, as numbered in SEQ ID NO: 1, a R1335X, and a T1337X mutation, or a corresponding mutation in any of the amino acid sequences provided herein, wherein X is any amino acid. In some embodiments, the SpCas9 domain comprises one or more of a D1135V, a G1218R, a R1335Q, and a T1337R mutation, as numbered in SEQ ID NO: 1, or a corresponding mutation in any of the amino acid sequences provided herein. In some embodiments, the SpCas9 domain comprises a D1135V, a G1218R, a R1335Q, and a T1337R mutation, as numbered in SEQ ID NO: 1, or corresponding mutations in any of the amino acid sequences provided herein.

[0459] In some embodiments, the Cas9 is a Cas9 variant having specificity for an altered PAM sequence. In some embodiments, the Additional Cas9 variants and PAM sequences are described in Miller et al., Continuous evolution of SpCas9 variants compatible with non-G PAMs. Nat Biotechnol (2020). doi.org/10.1038/s41587-020-0412-8, the entirety of which is incorporated herein by reference. in some embodiments, a Cas9 variate have no specific PAM requirements. In some embodiments, a Cas9 variant, e.g. a SpCas9 variant has specificity for a NRNH PAM, wherein R is A or G and H is A, C, or T. In some embodiments, the SpCas9 variant has specificity for a PAM sequence AAA, TAA, CAA, GAA, TAT, GAT, or CAC. In some embodiments, the SpCas9 variant comprises an amino acid substitution at position 1114, 1134, 1135, 1137, 1139, 1151, 1180, 1188, 1211, 1218, 1219, 1221, 1249, 1256, 1264, 1290, 1318, 1317, 1320, 1321, 1323, 1332, 1333, 1335, 1337, or 1339 as numbered in SEQ ID NO: 1 or a corresponding position thereof. In some embodiments, the SpCas9 variant comprises an amino acid substitution at position 1114, 1135, 1218, 1219, 1221, 1249, 1320, 1321, 1323, 1332, 1333, 1335, or 1337 as numbered in SEQ ID NO: 1 or a corresponding position thereof. In some embodiments, the SpCas9 variant comprises an amino acid substitution at position 1114, 1134, 1135, 1137, 1139, 1151, 1180, 1188, 1211, 1219, 1221, 1256, 1264, 1290, 1318, 1317, 1320, 1323, 1333 as numbered in SEQ ID NO: 1 or a corresponding position thereof. In some embodiments, the SpCas9 variant comprises an amino acid substitution at position 1114, 1131, 1135, 1150, 1156, 1180, 1191, 1218, 1219, 1221, 1227, 1249, 1253, 1286, 1293, 1320, 1321, 1332, 1335, 1339 as numbered in SEQ ID NO: 1 or a corresponding position thereof. In some embodiments, the SpCas9 variant comprises an amino acid substitution at position 1114, 1127, 1135, 1180, 1207, 1219, 1234, 1286, 1301, 1332, 1335, 1337, 1338, 1349 as numbered in SEQ ID NO: 1 or a corresponding position thereof. Exemplary amino acid substitutions and PAM specificity of SpCas9 variants are shown in Tables 5B, 5C, 5D, and 5E below.

TABLE 5B
Additional variant mutations and PAMs

| | SpCas9 amino acid position | | | | | | | | | | | | |
|---|---|---|---|---|---|---|---|---|---|---|---|---|---|
| SpCas9/ | 1114 | 1135 | 1218 | 1219 | 1221 | 1249 | 1320 | 1321 | 1323 | 1332 | 1333 | 1335 | 1337 |
| PAM | R | D | G | E | Q | P | A | P | A | D | R | R | T |
| AAA | | N | | V | H | | | | | | G | | |
| AAA | | N | | V | H | | | | | | G | | |
| AAA | | | | V | | | | | | | G | | |
| TAA | G | N | | V | | | | | | | I | | |
| TAA | | N | | V | | | | | | | I | | A |
| TAA | G | N | | V | | | | | | | I | | A |
| CAA | | | | V | | | | | | | K | | |
| CAA | | N | | V | | | | | | | K | | |
| CAA | | N | | V | | | | | | | K | | |
| GAA | | | | V | H | | V | | | | K | | |
| GAA | | N | | V | | | V | | | | K | | |
| GAA | | | | V | H | | V | | | | K | | |
| TAT | | | S | V | H | S | | S | | | | L | |
| TAT | | | S | V | H | S | | S | | | | L | |
| TAT | | | S | V | H | S | | S | | | | L | |
| GAT | | | | V | | | | | | | I | | |
| GAT | | | | V | | | | | D | | | Q | |
| GAT | | | | V | | | | | D | | | Q | |
| CAC | | | | V | | | | | | N | | Q | N |
| CAC | | N | | V | | | | | | | | Q | N |
| CAC | | | | V | | | | | | N | | Q | N |

TABLE 5C
Additional variant mutations and PAMs

| | SpCas9 amino acid position | | | | | | | | | | | | | | | | | | |
|---|---|---|---|---|---|---|---|---|---|---|---|---|---|---|---|---|---|---|---|
| SpCas9/ | 1114 | 1134 | 1135 | 1137 | 1139 | 1151 | 1180 | 1188 | 1211 | 1219 | 1221 | 1256 | 1264 | 1290 | 1318 | 1317 | 1320 | 1323 | 1333 |
| PAM | R | F | D | P | V | K | D | K | K | E | Q | Q | H | V | L | N | A | A | R |
| GAA | | | | | | | | | | V | H | | | | | | V | | K |
| GAA | | | N | S | | | | | | V | | | | | | | V | D | K |
| GAA | | | N | | | | | | | V | H | | Y | | | | V | | K |
| CAA | | | N | | | | | | | V | H | | Y | | | | V | | K |
| CAA | G | | N | S | | | | | | V | H | | Y | | | | V | | K |
| CAA | | | N | | | | | R | | V | H | | | | | | V | | K |
| CAA | | | N | | | | G | | R | V | H | | Y | | | | V | | K |
| CAA | | | N | | | | | | | V | H | | Y | | | | V | | K |
| AAA | | | N | | | | G | | | V | H | R | Y | | | | V | D | K |
| CAA | G | | N | | | | G | | | V | H | | Y | | | | V | D | K |
| CAA | | L | N | | | | G | | | V | H | | Y | | | T | V | D | K |
| TAA | G | | N | | | | G | | | V | H | | Y | G | S | | V | D | K |
| TAA | G | | N | | | E | G | | | V | H | | Y | | S | | V | | K |
| TAA | G | | N | | | | G | | | V | H | | Y | | S | | V | D | K |
| TAA | G | | N | | | | G | | R | V | H | | | | | | V | | K |
| TAA | | | N | | | | G | | R | V | H | | Y | | | | V | | K |
| TAA | G | | N | | A | | G | | | V | H | | | | | | V | | K |
| TAA | G | | N | | | | | | | V | H | | | | | | V | | K |

TABLE 5D
Additional variant mutations and PAMs

| | SpCas9 amino acid position | | | | | | | | | |
|---|---|---|---|---|---|---|---|---|---|---|
| SpCas9/ | 1114 | 1131 | 1135 | 1150 | 1156 | 1180 | 1191 | 1218 | 1219 | 1221 |
| PAM | R | Y | D | E | K | D | K | G | E | Q |
| SacB.TAT | | | N | | | | N | | V | H |
| SacB.TAT | | | N | | | | | S | V | H |
| AAT | | | N | | | | | S | V | H |
| TAT | G | | N | | | G | | S | V | H |
| TAT | G | | N | | | G | | S | V | H |
| TAT | G | C | N | | | G | | S | V | H |
| TAT | G | C | N | | | G | | S | V | H |
| TAT | G | C | N | | | G | | S | V | H |
| TAT | G | C | N | | E | G | | S | V | H |
| TAT | G | C | N | V | | G | | S | V | H |
| TAT | | C | N | | | G | | S | V | H |
| TAT | G | C | N | | | G | | S | V | H |

| | SpCas9 amino acid position | | | | | | | | | |
|---|---|---|---|---|---|---|---|---|---|---|
| SpCas9/ | 1227 | 1249 | 1253 | 1286 | 1293 | 1320 | 1321 | 1332 | 1335 | 1339 |
| PAM | A | P | E | N | A | A | P | D | R | T |
| SacB.TAT | | | | | | V | S | | L | |
| SacB.TAT | | S | | | | | S | G | L | |
| AAT | V | S | | K | T | | S | G | L | I |
| TAT | | S | K | | | | S | G | L | |
| TAT | | S | | | | | S | G | L | |
| TAT | | S | | | | | S | G | L | |
| TAT | | S | | | | | S | G | L | |
| TAT | | S | | | | | S | G | L | |
| TAT | | S | | | | | S | G | L | |
| TAT | | S | | | | | S | G | L | |
| TAT | | S | | | | | S | G | L | |
| TAT | | S | | | | | S | G | L | |

TABLE 5E
Additional variant mutations and PAM.

| | SpCas9 amino acid position | | | | | | | | | | | | | |
|---|---|---|---|---|---|---|---|---|---|---|---|---|---|---|
| | 1114 | 1127 | 1135 | 1180 | 1207 | 1219 | 1234 | 1286 | 1301 | 1332 | 1335 | 1337 | 1338 | 1349 |
| SpCas9 | R | D | D | D | E | E | N | N | P | D | R | T | S | H |

| | | | | | | | | | | | | | |
|---|---|---|---|---|---|---|---|---|---|---|---|---|---|
| SacB.CAC | | | N | | | V | | | N | Q | N | | |
| AAC | G | | N | | | V | | | N | Q | N | | |
| AAC | G | | N | | | V | | | N | Q | N | | |
| TAC | G | | N | | | V | | | N | Q | N | | |
| TAC | G | | N | | | V | | H | N | Q | N | | |
| TAC | G | | N | | G | V | D | H | N | Q | N | | |
| TAC | G | | N | | | V | | | N | Q | N | | |
| TAC | G | G | N | E | | V | | H | N | Q | N | | |
| TAC | G | | N | | | V | | H | N | Q | N | | |
| TAC | G | | N | | | V | | | N | Q | N | T | R |

[0460] In some embodiments, the Cas9 is a Neisseria menigitidis Cas9 (NmeCas9) or a variant thereof. In some embodiments, the NmeCas9 has specificity for a NNNNGAYW

[0461] PAM, wherein Y is C or T and W is A or T. In some embodiments, the NmeCas9 has specificity for a NNNNGYTT PAM, wherein Y is C or T. In some embodiments, the NmeCas9 has specificity for a NNNNGTCT PAM. In some embodiments, the NmeCas9 is a Nme1Cas9. In some embodiments, the NmeCas9 has specificity for a NNNNGATT PAM, a NNNNCCTA PAM, a NNNNCCTC PAM, a NNNNCCTT PAM, a NNNNCCTG PAM, a NNNNCCGT PAM, a NNNNCCGGPAM, a NNNNCCCA PAM, a NNNNCCCT PAM, a NNNNCCCC PAM, a NNNNCCAT PAM, a NNNNCCAG PAM, a NNNNCCAT PAM, or a NNNGATT PAM. In some embodiments, the Nme1Cas9 has specificity for a NNNNGATT PAM, a NNNNCCTA PAM, a NNNNCCTC PAM, a NNNNCCTT PAM, or a NNNNCCTG PAM. In some embodiments, the NmeCas9 has specificity for a CAA PAM, a CAAA PAM, or a CCA PAM. In some embodiments, the NmeCas9 is a Nme2 Cas9. In some embodiments, the NmeCas9 has specificity for a NNNNCC (N4CC) PAM, wherein N is any one of A, G, C, or T. in some embodiments, the NmeCas9 has specificity for a NNNNCCGT PAM, a NNNNCCGGPAM, a NNNNCCCA PAM, a NNNNCCCT PAM, a NNNNCCCC PAM, a NNNNCCAT PAM, a NNNNCCAG PAM, a NNNNCCAT PAM, or a NNNGATT PAM. In some embodiments, the NmeCas9 is a Nme3Cas9. In some embodiments, the NmeCas9 has specificity for a NNNNCAAA PAM, a NNNNCC PAM, or a NNNNCNNN PAM. Additional NmeCas9 features and PAM sequences as described in Edraki et al. Mol. Cell. (2019) 73(4): 714-726 is incorporated herein by reference in its entirety.

[0462] An exemplary amino acid sequence of a Nme1Cas9 is provided below:

type II CRISPR RNA-guided endonuclease Cas9
[Neisseria meningitidis] WP_002235 162.1
(SEQ ID NO: 104)

| | |
|---|---|
| 1 | maafkpnpin yilgldigia svgwamveid edenpiclid |
| | lgvrvferae vpktgdslam |
| 61 | arrlarsvrr ltrrrahrll rarrllkreg vlqaadfden |
| | glikslpntp wqlraaaldr |
| 121 | kltplewsav llhlikhrgy lsqrkneget adkelgallk |
| | gvadnahalq tgdfrtpael |
| 181 | alnkfekesg hirnqrgdys htfsrkdlqa elillfekqk |
| | efgnphvsgg lkegietllm |
| 241 | tqrpalsgda vqkmlghctf epaepkaakn tytaerfiwl |
| | tklnnlrile qgserpltdt |
| 301 | eratlmdepy rkskltyaqa rkllgledta ffkglrygkd |
| | naeastlmem kayhaisral |
| 361 | ekeglkdkks plnlspelqd eigtafslfk tdeditgrlk |
| | driqpeilea llkhisfdkf |
| 421 | vqislkalrr ivplmeqgkr ydeacaeiyg dhygkkntee |
| | kiylppipad eirnpvvlra |
| 481 | lsqarkving vvrrygspar ihietarevg ksfkdrkeie |
| | krqeenrkdr ekaaakfrey |
| 541 | fpnfvgepks kdilklrlye qqhgkclysg keinlgrlne |
| | kgyveidhal pfsrtwddsf |
| 601 | nnkvlvlgse nqnkgnqtpy eyfngkdnsr ewqefkarve |
| | tsrfprskkq rillqkfded |
| 661 | gfkernlndt ryvnrflcqf vadrmrltgk gkkrvfasng |
| | qitnllrgfw glrkvraend |
| 721 | rhhaldavvv acstvamqqk itrfvrykem nafdgktidk |
| | etgevlhqkt hfpqpweffa |
| 781 | qevmirvfgk pdgkpefeea dtpeklrtll aeklssrpea |
| | vheyvtplfv srapnrkmsg |
| 841 | qghmetvksa krldegvsvl rvpltqlklk dlekmvnrer |
| | epklyealka rleahkddpa |
| 901 | kafaepfyky dkagnrtqqv kavrveqvqk tgvwvrnhng |
| | iadnatmvrv dvfekgdkyy |
| 961 | lvpiyswqva kgilpdravv qgkdeedwql iddsfnfkfs |
| | lhpndlvevi tkkarmfgyf |
| 1021 | aschrgtgni nirihdldhk igkngilegi gvktalsfqk |
| | yqidelgkei rpcrlkkrpp |
| 1081 | vr |

[0463] An exemplary amino acid sequence of a Nme2Cas9 is provided below:

type II CRISPR RNA-guided endonuclease Cas9
[Neisseria meningitidis] WP_002230835.1
(SEQ ID NO: 105)

| | |
|---|---|
| 1 | maafkpnpin yilgldigia svgwamveid eeenpirlid |
| | lgvrvferae vpktgdslam |
| 61 | arrlarsvrr ltrrrahrll rarrllkreg vlqaadfden |
| | glikslpntp wqlraaaldr |
| 121 | kltplewsav llhlikhrgy lsqrkneget adkelgallk |
| | gvannahalq tgdfrtpael |
| 181 | alnkfekesg hirnqrgdys htfsrkdlqa elillfekqk |
| | efgnphvsgg lkegietllm |
| 241 | tqrpalsgda vqkmlghctf epaepkaakn tytaerfiwl |
| | tklnnlrile qgserpltdt |
| 301 | eratlmdepy rkskltyaqa rkllgledta ffkglrygkd |
| | naeastlmem kayhaisral |
| 361 | ekeglkdkks plnlsselqd eigtafslfk tdeditgrlk |
| | drvqpeilea llkhisfdkf |
| 421 | vqislkalrr ivplmeqgkr ydeacaeiyg dhygkkntee |
| | kiylppipad eirnpvvlra |
| 481 | lsqarkving vvrrygspar ihietarevg ksfkdrkeie |
| | krqeenrkdr ekaaakfrey |
| 541 | fpnfvgepks kdilklrlye qqhgkclysg keinlvrlne |
| | kgyveidhal pfsrtwddsf |
| 601 | nnkvlvlgse nqnkgnqtpy eyfngkdnsr ewqefkarve |
| | tsrfprskkq rillqkfded |
| 661 | gfkecnlndt ryvnrflcqf vadhilltgk gkrrvfasng |
| | qitnllrgfw glrkvraend |
| 721 | rhhaldavvv acstvamqqk itrfvrykem nafdgktidk |
| | etgkvlhqkt hfpqpweffa |
| 781 | qevmirvfgk pdgkpefeea dtpeklrtll aeklssrpea |
| | vheyvtplfv srapnrkmsg |
| 841 | ahkdtlrsak rfvkhnekis vkrvwlteik ladlenmvny |
| | kngreielye alkarleayg |
| 901 | gnakqafdpk dnpfykkggq lvkavrvekt qesgvllnkk |
| | naytiadngd mvrvdvfckv |
| 961 | dkkgknqyfi vpiyawqvae nilpdidckg yriddsytfc |
| | fslhkydlia fqkdekskve |
| 1021 | fayyincdss ngrfylawhd kgskeqqfri stqnlvliqk |
| | yqvnelgkei rpcrlkkrpp |
| 1081 | vr |

[0464] In some embodiments, the Cas9 domains of any of the fusion proteins provided herein comprises an amino acid sequence that is at least 60%, at least 65%, at least 70%, at least 75%, at least 80%, at least 85%, at least 90%, at least 95%, at least 96%, at least 97%, at least 98%, at least 99%, or at least 99.5% identical to a Cas9 polypeptide described herein. In some embodiments, the Cas9 domains of any of the fusion proteins provided herein comprises the amino acid sequence of any Cas9 polypeptide described herein. In some embodiments, the Cas9 domains of any of the fusion proteins provided herein consists of the amino acid sequence of any Cas9 polypeptide described herein.

[0465] In some examples, a PAM recognized by a CRISPR protein-derived domain of a base editor disclosed herein can be provided to a cell on a separate oligonucleotide to an insert (e.g., an AAV insert) encoding the base editor. In such embodiments, providing PAM on a separate oligonucleotide can allow cleavage of a target sequence that otherwise would not be able to be cleaved, because no adjacent PAM is present on the same polynucleotide as the target sequence.

[0466] In an embodiment, S. pyogenes Cas9 (SpCas9) can be used as a CRISPR endonuclease for genome engineering. However, others can be used. In some embodiments, a different endonuclease can be used to target certain genomic targets. In some embodiments, synthetic SpCas9-derived variants with non-NGG PAM sequences can be used. Additionally, other Cas9 orthologues from various species have been identified and these “non-SpCas9s” can bind a variety of PAM sequences that can also be useful for the present disclosure. For example, the relatively large size of SpCas9 (approximately 4 kb coding sequence) can lead to plasmids carrying the SpCas9 cDNA that cannot be efficiently expressed in a cell. Conversely, the coding sequence for Staphylococcus aureus Cas9 (SaCas9) is approximately 1 kilobase shorter than SpCas9, possibly allowing it to be efficiently expressed in a cell. Similar to SpCas9, the SaCas9 endonuclease is capable of modifying target genes in mammalian cells in vitro and in mice in vivo. In some embodiments, a Cas protein can target a different PAM sequence. In some embodiments, a target gene can be adjacent to a Cas9 PAM, 5′-NGG, for example. In other embodiments, other Cas9 orthologs can have different PAM requirements. For example, other PAMs such as those of S. thermophilus (5′-NNAGAA for CRISPR1 and 5′-NGGNG for CRISPR3) and Neisseria meningiditis (5′-NNNNGATT) can also be found adjacent to a target gene.

[0467] In some embodiments, for a S. pyogenes system, a target gene sequence can precede (i.e., be 5′ to) a 5′-NGG PAM, and a 20-nt guide RNA sequence can base pair with an opposite strand to mediate a Cas9 cleavage adjacent to a PAM. In some embodiments, an adjacent cut can be or can be about 3 base pairs upstream of a PAM. In some embodiments, an adjacent cut can be or can be about 10 base pairs upstream of a PAM. In some embodiments, an adjacent cut can be or can be about 0-20 base pairs upstream of a PAM. For example, an adjacent cut can be next to, 1, 2, 3, 4, 5, 6, 7, 8, 9, 10, 11, 12, 13, 14, 15, 16, 17, 18, 19, 20, 21, 22, 23, 24, 25, 26, 27, 28, 29, or 30 base pairs upstream of a PAM. An adjacent cut can also be downstream of a PAM by 1 to 30 base pairs. The sequences of exemplary SpCas9 proteins capable of binding a PAM sequence follow:

[0468] The amino acid sequence of an exemplary PAM-binding SpCas9 is as follows:

(SEQ ID NO: 1)
[sequence omitted]

[0469] The amino acid sequence of an exemplary PAM-binding SpCas9n is as follows:

(SEQ ID NO: 102)
MDKKYSIGLAIGTNSVGWAVITDEYKVPSKKFKVLGNTDRHSIKKNLIGA
LLFDSGETAEATRLKRTARRRYTRRKNRICYLQEIFSNEMAKVDDSFFHR
LEESFLVEEDKKHERHPIFGNIVDEVAYHEKYPTIYHLRKKLVDSTDKAD
LRLIYLALAHMIKFRGHFLIEGDLNPDNSDVDKLFIQLVQTYNQLFEENP
INASGVDAKAILSARLSKSRRLENLIAQLPGEKKNGLFGNLIALSLGLTP
NFKSNFDLAEDAKLQLSKDTYDDDLDNLLAQIGDQYADLFLAAKNLSDAI
LLSDILRVNTEITKAPLSASMIKRYDEHHQDLTLLKALVRQQLPEKYKEI
FFDQSKNGYAGYIDGGASQEEFYKFIKPILEKMDGTEELLVKLNREDLLR
KQRTFDNGSIPHQIHLGELHAILRRQEDFYPFLKDNREKIEKILTFRIPY
YVGPLARGNSRFAWMTRKSEETITPWNFEEVVDKGASAQSFIERMTNFDK
NLPNEKVLPKHSLLYEYFTVYNELTKVKYVTEGMRKPAFLSGEQKKAIVD
LLFKTNRKVTVKQLKEDYFKKIECFDSVEISGVEDRFNASLGTYHDLLKI
IKDKDFLDNEENEDILEDIVLTLTLFEDREMIEERLKTYAHLFDDKVMKQ
LKRRRYTGWGRLSRKLINGIRDKQSGKTILDFLKSDGFANRNFMQLIHDD
SLTFKEDIQKAQVSGQGDSLHEHIANLAGSPAIKKGILQTVKVVDELVKV
MGRHKPENIVIEMARENQTTQKGQKNSRERMKRIEEGIKELGSQILKEHP
VENTQLQNEKLYLYYLQNGRDMYVDQELDINRLSDYDVDHIVPQSFLKDD
SIDNKVLTRSDKNRGKSDNVPSEEVVKKMKNYWRQLLNAKLITQRKFDNL
TKAERGGLSELDKAGFIKRQLVETRQITKHVAQILDSRMNTKYDENDKLI
REVKVITLKSKLVSDFRKDFQFYKVREINNYHHAHDAYLNAVVGTALIKK
YPKLESEFVYGDYKVYDVRKMIAKSEQEIGKATAKYFFYSNIMNFFKTEI
TLANGEIRKRPLIETNGETGEIVWDKGRDFATVRKVLSMPQVNIVKKTEV
QTGGFSKESILPKRNSDKLIARKKDWDPKKYGGFDSPTVAYSVLVVAKVE
KGKSKKLKSVKELLGITIMERSSFEKNPIDFLEAKGYKEVKKDLIIKLPK
YSLFELENGRKRMLASAGELQKGNELALPSKYVNFLYLASHYEKLKGSPE
DNEQKQLFVEQHKHYLDEIIEQISEFSKRVILADANLDKVLSAYNKHRDK
PIREQAENIIHLFTLTNLGAPAAFKYFDTTIDRKRYTSTKEVLDATLIHQ
SITGLYETRIDLSQLGGD

[0470] The amino acid sequence of an exemplary PAM-binding SpEQR Cas9 is as follows:

(SEQ ID NO: 145)
MDKKYSIGLAIGTNSVGWAVITDEYKVPSKKFKVLGNTDRHSIKKNLIGA
LLFDSGETAEATRLKRTARRRYTRRKNRICYLQEIFSNEMAKVDDSFFHR
LEESFLVEEDKKHERHPIFGNIVDEVAYHEKYPTIYHLRKKLVDSTDKAD
LRLIYLALAHMIKFRGHFLIEGDLNPDNSDVDKLFIQLVQTYNQLFEENP
INASGVDAKAILSARLSKSRRLENLIAQLPGEKKNGLFGNLIALSLGLTP
NFKSNFDLAEDAKLQLSKDTYDDDLDNLLAQIGDQYADLFLAAKNLSDAI
LLSDILRVNTEITKAPLSASMIKRYDEHHQDLTLLKALVRQQLPEKYKEI
FFDQSKNGYAGYIDGGASQEEFYKFIKPILEKMDGTEELLVKLNREDLLR
KQRTFDNGSIPHQIHLGELHAILRRQEDFYPFLKDNREKIEKILTFRIPY
YVGPLARGNSRFAWMTRKSEETITPWNFEEVVDKGASAQSFIERMTNFDK
NLPNEKVLPKHSLLYEYFTVYNELTKVKYVTEGMRKPAFLSGEQKKAIVD
LLFKTNRKVTVKQLKEDYFKKIECFDSVEISGVEDRFNASLGTYHDLLKI
IKDKDFLDNEENEDILEDIVLTLTLFEDREMIEERLKTYAHLFDDKVMKQ
LKRRRYTGWGRLSRKLINGIRDKQSGKTILDFLKSDGFANRNFMQLIHDD
SLTFKEDIQKAQVSGQGDSLHEHIANLAGSPAIKKGILQTVKVVDELVKV
MGRHKPENIVIEMARENQTTQKGQKNSRERMKRIEEGIKELGSQILKEHP
VENTQLQNEKLYLYYLQNGRDMYVDQELDINRLSDYDVDHIVPQSFLKDD
SIDNKVLTRSDKNRGKSDNVPSEEVVKKMKNYWRQLLNAKLITQRKFDNL
TKAERGGLSELDKAGFIKRQLVETRQITKHVAQILDSRMNTKYDENDKLI
REVKVITLKSKLVSDFRKDFQFYKVREINNYHHAHDAYLNAVVGTALIKK
YPKLESEFVYGDYKVYDVRKMIAKSEQEIGKATAKYFFYSNIMNFFKTEI
TLANGEIRKRPLIETNGETGEIVWDKGRDFATVRKVLSMPQVNIVKKTEV
QTGGFSKESILPKRNSDKLIARKKDWDPKKYGGFESPTVAYSVLVVAKVE
KGKSKKLKSVKELLGITIMERSSFEKNPIDFLEAKGYKEVKKDLIIKLPK
YSLFELENGRKRMLASAGELQKGNELALPSKYVNFLYLASHYEKLKGSPE
DNEQKQLFVEQHKHYLDEIIEQISEFSKRVILADANLDKVLSAYNKHRDK
PIREQAENIIHLFTLTNLGAPAAFKYFDTTIDRKQYRSTKEVLDATLIHQ
SITGLYETRIDLSQLGGD

[0471] In the above sequence, residues E1134, Q1334, and R1336, which can be mutated from D1134, R1334, and T1336 to yield a SpEQR Cas9, are underlined and in bold.

[0472] The amino acid sequence of an exemplary PAM-binding SpVQR Cas9 is as follows:

(SEQ ID NO: 146)
MDKKYSIGLAIGTNSVGWAVITDEYKVPSKKFKVLGNTDRHSIKKNLIGA
LLFDSGETAEATRLKRTARRRYTRRKNRICYLQEIFSNEMAKVDDSFFHR
LEESFLVEEDKKHERHPIFGNIVDEVAYHEKYPTIYHLRKKLVDSTDKAD
LRLIYLALAHMIKFRGHFLIEGDLNPDNSDVDKLFIQLVQTYNQLFEENP
INASGVDAKAILSARLSKSRRLENLIAQLPGEKKNGLFGNLIALSLGLTP
NFKSNFDLAEDAKLQLSKDTYDDDLDNLLAQIGDQYADLFLAAKNLSDAI
LLSDILRVNTEITKAPLSASMIKRYDEHHQDLTLLKALVRQQLPEKYKEI
FFDQSKNGYAGYIDGGASQEEFYKFIKPILEKMDGTEELLVKLNREDLLR
KQRTFDNGSIPHQIHLGELHAILRRQEDFYPFLKDNREKIEKILTFRIPY
YVGPLARGNSRFAWMTRKSEETITPWNFEEVVDKGASAQSFIERMTNFDK
NLPNEKVLPKHSLLYEYFTVYNELTKVKYVTEGMRKPAFLSGEQKKAIVD
LLFKTNRKVTVKQLKEDYFKKIECFDSVEISGVEDRFNASLGTYHDLLKI
IKDKDFLDNEENEDILEDIVLTLTLFEDREMIEERLKTYAHLFDDKVMKQ
LKRRRYTGWGRLSRKLINGIRDKQSGKTILDFLKSDGFANRNEMQLIHDD
SLTFKEDIQKAQVSGQGDSLHEHIANLAGSPAIKKGILQTVKVVDELVKV
MGRHKPENIVIEMARENQTTQKGQKNSRERMKRIEEGIKELGSQILKEHP
VENTQLQNEKLYLYYLQNGRDMYVDQELDINRLSDYDVDHIVPQSFLKDD
SIDNKVLTRSDKNRGKSDNVPSEEVVKKMKNYWRQLLNAKLITQRKFDNL
TKAERGGLSELDKAGFIKRQLVETRQITKHVAQILDSRMNTKYDENDKLI
REVKVITLKSKLVSDFRKDFQFYKVREINNYHHAHDAYLNAVVGTALIKK
YPKLESEFVYGDYKVYDVRKMIAKSEQEIGKATAKYFFYSNIMNFFKTEI
TLANGEIRKRPLIETNGETGEIVWDKGRDFATVRKVLSMPQVNIVKKTEV
QTGGFSKESILPKRNSDKLIARKKDWDPKKYGGFVSPTVAYSVLVVAKVE
KGKSKKLKSVKELLGITIMERSSFEKNPIDFLEAKGYKEVKKDLIIKLPK
YSLFELENGRKRMLASAGELQKGNELALPSKYVNFLYLASHYEKLKGSPE
DNEQKQLFVEQHKHYLDEIIEQISEFSKRVILADANLDKVLSAYNKHRDK
PIREQAENIIHLFTLTNLGAPAAFKYFDTTIDRKQYRSTKEVLDATLIHQ
SITGLYETRIDLSQLGGD

[0473] In the above sequence, residues V1134, Q1334, and R1336, which can be mutated from D1134, R1334, and T1336 to yield a SpVQR Cas9, are underlined and in bold.

[0474] The amino acid sequence of an exemplary PAM-binding SpVRER Cas9 is as follows:

(SEQ ID NO: 147)
MDKKYSIGLAIGTNSVGWAVITDEYKVPSKKFKVLGNTDRHSIKKNLIGA
LLFDSGETAEATRLKRTARRRYTRRKNRICYLQEIFSNEMAKVDDSFFHR
LEESFLVEEDKKHERHPIFGNIVDEVAYHEKYPTIYHLRKKLVDSTDKAD
LRLIYLALAHMIKFRGHFLIEGDLNPDNSDVDKLFIQLVQTYNQLFEENP
INASGVDAKAILSARLSKSRRLENLIAQLPGEKKNGLFGNLIALSLGLTP
NFKSNFDLAEDAKLQLSKDTYDDDLDNLLAQIGDQYADLFLAAKNLSDAI
LLSDILRVNTEITKAPLSASMIKRYDEHHQDLTLLKALVRQQLPEKYKEI
FFDQSKNGYAGYIDGGASQEEFYKFIKPILEKMDGTEELLVKLNREDLLR
KQRTFDNGSIPHQIHLGELHAILRRQEDFYPFLKDNREKIEKILTFRIPY
YVGPLARGNSRFAWMTRKSEETITPWNFEEVVDKGASAQSFIERMTNFDK
NLPNEKVLPKHSLLYEYFTVYNELTKVKYVTEGMRKPAFLSGEQKKAIVD
LLFKTNRKVTVKQLKEDYFKKIECFDSVEISGVEDRFNASLGTYHDLLKI
IKDKDFLDNEENEDILEDIVLTLTLFEDREMIEERLKTYAHLFDDKVMKQ
LKRRRYTGWGRLSRKLINGIRDKQSGKTILDFLKSDGFANRNFMQLIHDD
SLTFKEDIQKAQVSGQGDSLHEHIANLAGSPAIKKGILQTVKVVDELVKV
MGRHKPENIVIEMARENQTTQKGQKNSRERMKRIEEGIKELGSQILKEHP
VENTQLQNEKLYLYYLQNGRDMYVDQELDINRLSDYDVDHIVPQSFLKDD
SIDNKVLTRSDKNRGKSDNVPSEEVVKKMKNYWRQLLNAKLITQRKFDNL
TKAERGGLSELDKAGFIKRQLVETRQITKHVAQILDSRMNTKYDENDKLI
REVKVITLKSKLVSDFRKDFQFYKVREINNYHHAHDAYLNAVVGTALIKK
YPKLESEFVYGDYKVYDVRKMIAKSEQEIGKATAKYFFYSNIMNFFKTEI
TLANGEIRKRPLIETNGETGEIVWDKGRDFATVRKVLSMPQVNIVKKTEV
QTGGFSKESILPKRNSDKLIARKKDWDPKKYGGFVSPTVAYSVLVVAKVE
KGKSKKLKSVKELLGITIMERSSFEKNPIDFLEAKGYKEVKKDLIIKLPK
YSLFELENGRKRMLASARELQKGNELALPSKYVNELYLASHYEKLKGSPE
DNEQKQLFVEQHKHYLDEIIEQISEFSKRVILADANLDKVLSAYNKHRDK
PIREQAENIIHLFTLTNLGAPAAFKYFDTTIDRKEYRSTKEVLDATLIHQ
SITGLYETRIDLSQLGGD.

[0475] In the above sequence, residues V1134, R1217, Q1334, and R1336, which can be mutated from D1134, G1217, R1334, and T1336 to yield a SpVRER Cas9, are underlined and in bold.

[0476] In some embodiments, the Cas9 domain is a recombinant Cas9 domain. In some embodiments, the recombinant Cas9 domain is a SpyMacCas9 domain. In some embodiments, the SpyMacCas9 domain is a nuclease active SpyMacCas9, a nuclease inactive SpyMacCas9 (SpyMacCas9d), or a SpyMacCas9 nickase (SpyMacCas9n). In some embodiments, the SaCas9 domain, the SaCas9d domain, or the SaCas9n domain can bind to a nucleic acid sequence having a non-canonical PAM. In some embodiments, the SpyMacCas9 domain, the SpCas9d domain, or the SpCas9n domain can bind to a nucleic acid sequence having a NAA PAM sequence.

[0477] The sequence of an exemplary Cas9 A homolog of Spy Cas9 in Streptococcus macacae with native 5′-NAAN-3′ PAM specificity is known in the art and described, for example, by Jakimo et al., (www.biorxiv.org/content/biorxiv/early/2018/09/27/429654.full.pdf), and is provided below.

### SpyMacCas9

(SEQ ID NO: 148)
MDKKYSIGLDIGTNSVGWAVITDDYKVPSKKFKVLGNTDRHSIKKNLIGA
LLFGSGETAEATRLKRTARRRYTRRKNRICYLQEIFSNEMAKVDDSFFHR
LEESFLVEEDKKHERHPIFGNIVDEVAYHEKYPTIYHLRKKLADSTDKAD
LRLIYLALAHMIKFRGHFLIEGDLNPDNSDVDKLFIQLVQIYNQLFEENP
INASRVDAKAILSARLSKSRRLENLIAQLPGEKRNGLFGNLIALSLGLTP
NFKSNFDLAEDAKLQLSKDTYDDDLDNLLAQIGDQYADLFLAAKNLSDAI
LLSDILRVNSEITKAPLSASMIKRYDEHHQDLTLLKALVRQQLPEKYKEI
FFDQSKNGYAGYIDGGASQEEFYKFIKPILEKMDGTEELLVKLNREDLLR
KQRTFDNGSIPHQIHLGELHAILRRQEDFYPFLKDNREKIEKILTFRIPY
YVGPLARGNSRFAWMTRKSEETITPWNFEEVVDKGASAQSFIERMTNFDK
NLPNEKVLPKHSLLYEYFTVYNELTKVKYVTEGMRKPAFLSGEQKKAIVD
LLFKTNRKVTVKQLKEDYFKKIECFDSVEISGVEDRFNASLGAYHDLLKI
IKDKDFLDNEENEDILEDIVLTLTLFEDRGMIEERLKTYAHLFDDKVMKQ
LKRRRYTGWGRLSRKLINGIRDKQSGKTILDFLKSDGFANRNFMQLIHDD
SLTFKEDIQKAQVSGQGHSLHEQIANLAGSPAIKKGILQTVKIVDELVKV
MGHKPENIVIEMARENQTTQKGQKNSRERMKRIEEGIKELGSQILKEHPV
ENTQLQNEKLYLYYLQNGRDMYVDQELDINRLSDYDVDHIVPQSFIKDDS
IDNKVLTRSDKNRGKSDNVPSEEVVKKMKNYWRQLLNAKLITQRKEDNLT
KAERGGLSELDKAGFIKRQLVETRQITKHVAQILDSRMNTKYDENDKLIR
EVKVITLKSKLVSDFRKDFQFYKVREINNYHHAHDAYLNAVVGTALIKKY
PKLESEFVYGDYKVYDVRKMIAKSEQEIGKATAKYFFYSNIMNFFKTEIT
LANGEIRKRPLIETNGETGEIVWDKGRDFATVRKVLSMPQVNIVKKTEIQ
TVGQNGGLFDDNPKSPLEVTPSKLVPLKKELNPKKYGGYQKPTTAYPVLL
ITDTKQLIPISVMNKKQFEQNPVKFLRDRGYQQVGKNDFIKLPKYTLVDI
GDGIKRLWASSKEIHKGNQLVVSKKSQILLYHAHHLDSDLSNDYLQNHNQ
QFDVLFNEIISFSKKCKLGKEHIQKIENVYSNKKNSASIEELAESFIKLL
GFTQLGATSPFNFLGVKLNQKQYKGKKDYILPCTEGTLIRQSITGLYETR
VDLSKIGED.

[0479] In some embodiments, a variant Cas9 protein harbors, H840A, P475A, W476A, N477A, D1125A, W1126A, and D1218A mutations such that the polypeptide has a reduced ability to cleave a target DNA or RNA. Such a Cas9 protein has a reduced ability to cleave a target DNA (e.g., a single stranded target DNA) but retains the ability to bind a target DNA (e.g., a single stranded target DNA). As another non-limiting example, in some embodiments, the variant Cas9 protein harbors D10A, H840A, P475A, W476A, N477A, D1125A, W1126A, and D1218A mutations such that the polypeptide has a reduced ability to cleave a target DNA. Such a Cas9 protein has a reduced ability to cleave a target DNA (e.g., a single stranded target DNA) but retains the ability to bind a target DNA (e.g., a single stranded target DNA). In some embodiments, when a variant Cas9 protein harbors W476A and W1126A mutations or when the variant Cas9 protein harbors P475A, W476A, N477A, D1125A, W1126A, and D1218A mutations, the variant Cas9 protein does not bind efficiently to a PAM sequence. Thus, in some such cases, when such a variant Cas9 protein is used in a method of binding, the method does not require a PAM sequence. In other words, in some embodiments, when such a variant Cas9 protein is used in a method of binding, the method can include a guide RNA, but the method can be performed in the absence of a PAM sequence (and the specificity of binding is therefore provided by the targeting segment of the guide RNA). Other residues can be mutated to achieve the above effects (i.e., inactivate one or the other nuclease portions). As non-limiting examples, residues D10, G12, G17, E762, H840, N854, N863, H982, H983, A984, D986, and/or A987 can be altered (i.e., substituted). Also, mutations other than alanine substitutions are suitable.

[0480] In some embodiments, a CRISPR protein-derived domain of a base editor can comprise all or a portion of a Cas9 protein with a canonical PAM sequence (NGG). In other embodiments, a Cas9-derived domain of a base editor can employ a non-canonical PAM sequence. Such sequences have been described in the art and would be apparent to the skilled artisan. For example, Cas9 domains that bind non-canonical PAM sequences have been described in Kleinstiver, B. P., et al., “Engineered CRISPR-Cas9 nucleases with altered PAM specificities” Nature 523, 481-485 (2015); and Kleinstiver, B. P., et al., “Broadening the targeting range of Staphylococcus aureus CRISPR-Cas9 by modifying PAM recognition” Nature Biotechnology 33, 1293-1298 (2015); the entire contents of each are hereby incorporated by reference.

Cas9 Domains with Reduced PAM Exclusivity

[0481] Typically, Cas9 proteins, such as Cas9 from S. pyogenes (spCas9), require a canonical NGG PAM sequence to bind a particular nucleic acid region, where the “N” in “NGG” is adenosine (A), thymidine (T), or cytosine (C), and the G is guanosine. This may limit the ability to edit desired bases within a genome. In some embodiments, the base editing fusion proteins provided herein may need to be placed at a precise location, for example a region comprising a target base that is upstream of the PAM. See e.g., Komor, A. C., et al., “Programmable editing of a target base in genomic DNA without double-stranded DNA cleavage” Nature 533, 420-424 (2016), the entire contents of which are hereby incorporated by reference. Accordingly, in some embodiments, any of the fusion proteins provided herein may contain a Cas9 domain that is capable of binding a nucleotide sequence that does not contain a canonical (e.g., NGG) PAM sequence. Cas9 domains that bind to non-canonical PAM sequences have been described in the art and would be apparent to the skilled artisan. For example, Cas9 domains that bind non-canonical PAM sequences have been described in Kleinstiver, B. P., et al., “Engineered CRISPR-Cas9 nucleases with altered PAM specificities” Nature 523, 481-485 (2015); and Kleinstiver, B. P., et al., “Broadening the targeting range of Staphylococcus aureus CRISPR-Cas9 by modifying PAM recognition” Nature Biotechnology 33, 1293-1298 (2015); the entire contents of each are hereby incorporated by reference.

### High Fidelity Cas9 Domains

[0482] Some aspects of the disclosure provide high fidelity Cas9 domains. In some embodiments, high fidelity Cas9 domains are engineered Cas9 domains comprising one or more mutations that decrease electrostatic interactions between the Cas9 domain and a sugar-phosphate backbone of a DNA, as compared to a corresponding wild-type Cas9 domain. Without wishing to be bound by any particular theory, high fidelity Cas9 domains that have decreased electrostatic interactions with a sugar-phosphate backbone of DNA may have less off-target effects. In some embodiments, a Cas9 domain (e.g., a wild-type Cas9 domain) comprises one or more mutations that decreases the association between the Cas9 domain and a sugar-phosphate backbone of a DNA. In some embodiments, a Cas9 domain comprises one or more mutations that decreases the association between the Cas9 domain and a sugar-phosphate backbone of a DNA by at least 1%, at least 2%, at least 3%, at least 4%, at least 5%, at least 10%, at least 15%, at least 20%, at least 25%, at least 30%, at least 35%, at least 40%, at least 45%, at least 50%, at least 55%, at least 60%, at least 65%, or at least 70%.

[0483] In some embodiments, any of the Cas9 fusion proteins provided herein comprise one or more of a N497X, a R661X, a Q695X, and/or a Q926X mutation, or a corresponding mutation in any of the amino acid sequences provided herein, wherein X is any amino acid. In some embodiments, any of the Cas9 fusion proteins provided herein comprise one or more of a N497A, a R661A, a Q695A, and/or a Q926A mutation, or a corresponding mutation in any of the amino acid sequences provided herein. In some embodiments, the Cas9 domain comprises a D10A mutation, or a corresponding mutation in any of the amino acid sequences provided herein. Cas9 domains with high fidelity are known in the art and would be apparent to the skilled artisan. For example, Cas9 domains with high fidelity have been described in Kleinstiver, B. P., et al. “High-fidelity CRISPR-Cas9 nucleases with no detectable genome-wide off-target effects.” Nature 529, 490-495 (2016); and Slaymaker, I. M., et al. “Rationally engineered Cas9 nucleases with improved specificity.” Science 351, 84-88 (2015); the entire contents of each are incorporated herein by reference.

[0484] In some embodiments, the modified Cas9 is a high fidelity Cas9 enzyme. In some embodiments, the high fidelity Cas9 enzyme is SpCas9(K855A), eSpCas9(1.1), SpCas9-HF1, or hyper accurate Cas9 variant (HypaCas9). The modified Cas9 eSpCas9(1.1) contains alanine substitutions that weaken the interactions between the HNH/RuvC groove and the non-target DNA strand, preventing strand separation and cutting at off-target sites. Similarly, SpCas9-HF1 lowers off-target editing through alanine substitutions that disrupt Cas9's interactions with the DNA phosphate backbone. HypaCas9 contains mutations (SpCas9 N692A/M694A/Q695A/H698A) in the REC3 domain that increase Cas9 proofreading and target discrimination. All three high fidelity enzymes generate less off-target editing than wildtype Cas9.

[0485] An exemplary high fidelity Cas9 is provided below.

[0486] High Fidelity Cas9 domain mutations relative to Cas9 are shown in bold and underlined.

(SEQ ID NO: 149)
DKKYSIGLAIGTNSVGWAVITDEYKVPSKKFKVLGNTDRHSIKKNLIGAL
LEDSGETAEATRLKRTARRRYTRRKNRICYLQEIFSNEMAKVDDSFFHRL
EESFLVEEDKKHERHPIFGNIVDEVAYHEKYPTIYHLRKKLVDSTDKADL
RLIYLALAHMIKFRGHFLIEGDLNPDNSDVDKLFIQLVQTYNQLFEENPI
NASGVDAKAILSARLSKSRRLENLIAQLPGEKKNGLFGNLIALSLGLTPN
FKSNFDLAEDAKLQLSKDTYDDDLDNLLAQIGDQYADLFLAAKNLSDAIL
LSDILRVNTEITKAPLSASMIKRYDEHHQDLTLLKALVRQQLPEKYKEIF
FDQSKNGYAGYIDGGASQEEFYKFIKPILEKMDGTEELLVKLNREDLLRK
QRTFDNGSIPHQIHLGELHAILRRQEDFYPFLKDNREKIEKILTFRIPYY
VGPLARGNSRFAWMTRKSEETITPWNFEEVVDKGASAQSFIERMTAFDKN
LPNEKVLPKHSLLYEYFTVYNELTKVKYVTEGMRKPAFLSGEQKKAIVDL
LFKTNRKVTVKQLKEDYFKKIECFDSVEISGVEDRFNASLGTYHDLLKII
KDKDFLDNEENEDILEDIVLTLTLFEDREMIEERLKTYAHLFDDKVMKQL
KRRRYTGWGALSRKLINGIRDKQSGKTILDFLKSDGFANRNFMMLIHDDS
LTFKEDIQKAQVSGQGDSLHEHIANLAGSPAIKKGILQTVKVVDELVKVM
GRHKPENIVIEMARENQTTQKGQKNSRERMKRIEEGIKELGSQILKEHPV
ENTQLQNEKLYLYYLQNGRDMYVDQELDINRLSDYDVDHIVPQSFLKDDS
IDNKVLTRSDKNRGKSDNVPSEEVVKKMKNYWRQLLNAKLITQRKFDNLT
KAERGGLSELDKAGFIKRQLVETRAITKHVAQILDSRMNTKYDENDKLIR
EVKVITLKSKLVSDFRKDFQFYKVREINNYHHAHDAYLNAVVGTALIKKY
PKLESEFVYGDYKVYDVRKMIAKSEQEIGKATAKYFFYSNIMNFFKTEIT
LANGEIRKRPLIETNGETGEIVWDKGRDFATVRKVLSMPQVNIVKKTEVQ
TGGFSKESILPKRNSDKLIARKKDWDPKKYGGFDSPTVAYSVLVVAKVEK
GKSKKLKSVKELLGITIMERSSFEKNPIDFLEAKGYKEVKKDLIIKLPKY
SLFELENGRKRMLASAGELQKGNELALPSKYVNFLYLASHYEKLKGSPED
NEQKQLFVEQHKHYLDEIIEQISEFSKRVILADANLDKVLSAYNKHRDKP
IREQAENIIHLFTLTNLGAPAAFKYFDTTIDRKRYTSTKEVLDATLIHQS
ITGLYETRIDLSQLGGD

Fusion Proteins Comprising a Cas9 Domain and a Cytidine Deaminase and/or Adenosine Deaminase

[0487] Some aspects of the disclosure provide fusion proteins comprising a napDNAbp (e.g., a Cas9 domain) and one or more adenosine deaminase, cytidine deaminase domains, and/or DNA glycosylase domains. In some embodiments, the fusion protein comprises a Cas9 domain and an adenosine deaminase domain (e.g., TadA*A). It should be appreciated that the Cas9 domain may be any of the Cas9 domains or Cas9 proteins (e.g., dCas9 or nCas9) provided herein. In some embodiments, any of the Cas9 domains or Cas9 proteins (e.g., dCas9 or nCas9) provided herein may be fused with any of the cytidine deaminases and/or adenosine deaminases (e.g., TadA*A) provided herein. For example, and without limitation, in some embodiments, the fusion protein comprises the structure:

[0488] NH₂-[cytidine deaminase]-[Cas9 domain]-[adenosine deaminase]-COOH;

[0489] NH₂-[adenosine deaminase]-[Cas9 domain]-[cytidine deaminase]-COOH;

[0490] NH₂-[adenosine deaminase]-[cytidine deaminase]-[Cas9 domain]-COOH;

[0491] NH₂-[cytidine deaminase]-[adenosine deaminase]-[Cas9 domain]-COOH;

[0492] NH₂-[Cas9 domain]-[adenosine deaminase]-[cytidine deaminase]-COOH;

[0493] NH₂-[Cas9 domain]-[cytidine deaminase]-[adenosine deaminase]-COOH;

[0494] NH₂-[adenosine deaminase]-[Cas9 domain]-COOH;

[0495] NH₂-[Cas9 domain]-[adenosine deaminase]-COOH;

[0496] NH₂-[cytidine deaminase]-[Cas9 domain]-COOH; or

[0497] NH₂-[Cas9 domain]-[cytidine deaminase]-COOH.

[0498] In some embodiments, the fusion proteins comprising a cytidine deaminase, abasic editor, and adenosine deaminase and a napDNAbp (e.g., Cas9 domain) do not include a linker sequence. In some embodiments, a linker is present between the cytidine deaminase and/or adenosine deaminase domains and the napDNAbp. In some embodiments, the “-” used in the general architecture above indicates the presence of an optional linker. In some embodiments, the cytidine deaminase and adenosine deaminase and the napDNAbp are fused via any of the linkers provided herein. For example, in some embodiments the cytidine deaminase and/or adenosine deaminase and the napDNAbp are fused via any of the linkers provided herein.

### Fusion Proteins Comprising a Nuclear Localization Sequence (NLS)

[0499] In some embodiments, the fusion proteins provided herein further comprise one or more (e.g., 2, 3, 4, 5) nuclear targeting sequences, for example a nuclear localization sequence (NLS). In one embodiment, a bipartite NLS is used. In some embodiments, a NLS comprises an amino acid sequence that facilitates the importation of a protein, that comprises an NLS, into the cell nucleus (e.g., by nuclear transport). In some embodiments, any of the fusion proteins provided herein further comprise a nuclear localization sequence (NLS). In some embodiments, the NLS is fused to the N-terminus of the fusion protein. In some embodiments, the NLS is fused to the C-terminus of the fusion protein. In some embodiments, the NLS is fused to the N-terminus of the Cas9 domain. In some embodiments, the NLS is fused to the C-terminus of an nCas9 domain or a dCas9 domain. In some embodiments, the NLS is fused to the N-terminus of the deaminase. In some embodiments, the NLS is fused to the C-terminus of the deaminase. In some embodiments, the NLS is fused to the fusion protein via one or more linkers. In some embodiments, the NLS is fused to the fusion protein without a linker. In some embodiments, the NLS comprises an amino acid sequence of any one of the NLS sequences provided or referenced herein. Additional nuclear localization sequences are known in the art and would be apparent to the skilled artisan. For example, NLS sequences are described in Plank et al., PCT/EP2000/011690, the contents of which are incorporated herein by reference for their disclosure of exemplary nuclear localization sequences. In some embodiments, an NLS comprises the amino acid sequence PKKKRKVEGADKRTADGSEFESPKKKRKV (SEQ ID NO: 150), KRTADGSEFESPKKKRKV (SEQ ID NO: 80), KRPAATKKAGQAKKKK (SEQ ID NO: 81), KKTELQTTNAENKTKKL (SEQ ID NO: 82), KRGINDRNFWRGENGRKTR (SEQ ID NO: 83), RKSGKIAAIVVKRPRKPKKKRKV (SEQ ID NO: 151), orMDSLLMNRRKFLYQFKNVRWAKGRRETYLC (SEQ ID NO: 86).

[0500] In some embodiments, the NLS is present in a linker or the NLS is flanked by linkers, for example, the linkers described herein. In some embodiments, the N-terminus or C-terminus NLS is a bipartite NLS. A bipartite NLS comprises two basic amino acid clusters, which are separated by a relatively short spacer sequence (hence bipartite—2 parts, while monopartite NLSs are not). The NLS of nucleoplasmin, KR[PAATKKAGQA]KKKK (SEQ ID NO: 152), is the prototype of the ubiquitous bipartite signal: two clusters of basic amino acids, separated by a spacer of about 10 amino acids. The sequence of an exemplary bipartite NLS follows:

(SEQ ID NO: 150)
PKKKRKVEGADKRTADGSEFESPKKKRKV

[0501] In some embodiments, the fusion proteins of the invention do not comprise a linker sequence. In some embodiments, linker sequences between one or more of the domains or proteins are present. In some embodiments, the general architecture of exemplary Cas9 fusion proteins with an adenosine deaminase or cytidine deaminase and a Cas9 domain comprises any one of the following structures, where NLS is a nuclear localization sequence (e.g., any NLS provided herein), NH₂ is the N-terminus of the fusion protein, and COOH is the C-terminus of the fusion protein:

[0502] NH₂-NLS-[adenosine deaminase]-[Cas9 domain]-COOH;

[0503] NH₂-NLS [Cas9 domain]-[adenosine deaminase]-COOH;

[0504] NH₂-[adenosine deaminase]-[Cas9 domain]-NLS—COOH;

[0505] NH₂-[Cas9 domain]-[adenosine deaminase]-NLS—COOH;

[0506] NH₂-NLS-[cytidine deaminase]-[Cas9 domain]-COOH;

[0507] NH₂-NLS [Cas9 domain]-[cytidine deaminase]-COOH;

[0508] NH₂-[cytidine deaminase]-[Cas9 domain]-NLS—COOH; or

[0509] NH₂-[Cas9 domain]-[cytidine deaminase]-NLS—COOH.

[0510] It should be appreciated that the fusion proteins of the present disclosure may comprise one or more additional features. For example, in some embodiments, the fusion protein may comprise inhibitors, cytoplasmic localization sequences, export sequences, such as nuclear export sequences, or other localization sequences, as well as sequence tags that are useful for solubilization, purification, or detection of the fusion proteins. Suitable protein tags provided herein include, but are not limited to, biotin carboxylase carrier protein (BCCP) tags, myc-tags, calmodulin-tags, FLAG-tags, hemagglutinin (HA)-tags, polyhistidine tags, also referred to as histidine tags or His-tags, maltose binding protein (MBP)-tags, nus-tags, glutathione-S-transferase (GST)-tags, green fluorescent protein (GFP)-tags, thioredoxin-tags, S-tags, Softags (e.g., Softag 1, Softag 3), strep-tags, biotin ligase tags, FlAsH tags, V5 tags, and SBP-tags. Additional suitable sequences will be apparent to those of skill in the art. In some embodiments, the fusion protein comprises one or more His tags.

[0511] A vector that encodes a CRISPR enzyme comprising one or more nuclear localization sequences (NLSs) can be used. For example, there can be or be about 1, 2, 3, 4, 5, 6, 7, 8, 9, 10 NLSs used. A CRISPR enzyme can comprise the NLSs at or near the ammo-terminus, about or more than about 1, 2, 3, 4, 5, 6, 7, 8, 9, 10 NLSs at or near the carboxy-terminus, or any combination of these (e.g., one or more NLS at the ammo-terminus and one or more NLS at the carboxy terminus). When more than one NLS is present, each can be selected independently of others, such that a single NLS can be present in more than one copy and/or in combination with one or more other NLSs present in one or more copies.

[0512] CRISPR enzymes used in the methods can comprise about 6 NLSs. An NLS is considered near the N- or C-terminus when the nearest amino acid to the NLS is within about 50 amino acids along a polypeptide chain from the N- or C-terminus, e.g., within 1, 2, 3, 4, 5, 10, 15, 20, 25, 30, 40, or 50 amino acids.

Nucleobase Editing Domain Described herein are base editors comprising a fusion protein that includes a polynucleotide programmable nucleotide binding domain and a nucleobase editing domain (e.g., a deaminase domain). The base editor can be programmed to edit one or more bases in a target polynucleotide sequence by interacting with a guide polynucleotide capable of recognizing the target sequence. Once the target sequence has been recognized, the base editor is anchored on the polynucleotide where editing is to occur and the deaminase domain components of the base editor can then edit a target base.

[0513] In some embodiments, the nucleobase editing domain includes a deaminase domain. As particularly described herein, the deaminase domain includes a cytosine deaminase or an adenosine deaminase. In some embodiments, the terms “cytosine deaminase” and “cytidine deaminase” can be used interchangeably. In some embodiments, the terms “adenine deaminase” and “adenosine deaminase” can be used interchangeably. Details of nucleobase editing proteins are described in International PCT Application Nos. PCT/2017/045381 (WO2018/027078) and PCT/US2016/058344 (WO2017/070632), each of which is incorporated herein by reference for its entirety. Also see Komor, A. C., et al., “Programmable editing of a target base in genomic DNA without double-stranded DNA cleavage” Nature 533, 420-424 (2016); Gaudelli, N. M., et al., “Programmable base editing of A•T to G•C in genomic DNA without DNA cleavage” Nature 551, 464-471 (2017); and Komor, A. C., et al., “Improved base excision repair inhibition and bacteriophage Mu Gam protein yields C:G-to-T:A base editors with higher efficiency and product purity” Science Advances 3:eaao4774 (2017), the entire contents of which are hereby incorporated by reference.

### A to G Editing

[0514] In some embodiments, a base editor described herein can comprise a deaminase domain which includes an adenosine deaminase. Such an adenosine deaminase domain of a base editor can facilitate the editing of an adenine (A) nucleobase to a guanine (G) nucleobase by deaminating the A to form inosine (I), which exhibits base pairing properties of G. Adenosine deaminase is capable of deaminating (i.e., removing an amine group) adenine of a deoxyadenosine residue in deoxyribonucleic acid (DNA).

[0515] In some embodiments, the nucleobase editors provided herein can be made by fusing together one or more protein domains, thereby generating a fusion protein. In certain embodiments, the fusion proteins provided herein comprise one or more features that improve the base editing activity (e.g., efficiency, selectivity, and specificity) of the fusion proteins. For example, the fusion proteins provided herein can comprise a Cas9 domain that has reduced nuclease activity. In some embodiments, the fusion proteins provided herein can have a Cas9 domain that does not have nuclease activity (dCas9), or a Cas9 domain that cuts one strand of a duplexed DNA molecule, referred to as a Cas9 nickase (nCas9). Without wishing to be bound by any particular theory, the presence of the catalytic residue (e.g., H840) maintains the activity of the Cas9 to cleave the non-edited (e.g., non-deaminated) strand containing a T opposite the targeted A. Mutation of the catalytic residue (e.g., D10 to A10) of Cas9 prevents cleavage of the edited strand containing the targeted A residue. Such Cas9 variants are able to generate a single-strand DNA break (nick) at a specific location based on the gRNA-defined target sequence, leading to repair of the non-edited strand, ultimately resulting in a T to C change on the non-edited strand. In some embodiments, an A-to-G base editor further comprises an inhibitor of inosine base excision repair, for example, a uracil glycosylase inhibitor (UGI) domain or a catalytically inactive inosine specific nuclease. Without wishing to be bound by any particular theory, the UGI domain or catalytically inactive inosine specific nuclease can inhibit or prevent base excision repair of a deaminated adenosine residue (e.g., inosine), which can improve the activity or efficiency of the base editor.

[0516] A base editor comprising an adenosine deaminase can act on any polynucleotide, including DNA, RNA and DNA-RNA hybrids. In certain embodiments, a base editor comprising an adenosine deaminase can deaminate a target A of a polynucleotide comprising RNA. For example, the base editor can comprise an adenosine deaminase domain capable of deaminating a target A of an RNA polynucleotide and/or a DNA-RNA hybrid polynucleotide. In an embodiment, an adenosine deaminase incorporated into a base editor comprises all or a portion of adenosine deaminase acting on RNA (ADAR, e.g., ADAR1 or ADAR2). In another embodiment, an adenosine deaminase incorporated into a base editor comprises all or a portion of adenosine deaminase acting on tRNA (ADAT). A base editor comprising an adenosine deaminase domain can also be capable of deaminating an A nucleobase of a DNA polynucleotide. In an embodiment an adenosine deaminase domain of a base editor comprises all or a portion of an ADAT comprising one or more mutations which permit the ADAT to deaminate a target A in DNA. For example, the base editor can comprise all or a portion of an ADAT from Escherichia coli (EcTadA) comprising one or more of the following mutations: D108N, A106V, D147Y, E155V, L84F, H123Y, I156F, or a corresponding mutation in another adenosine deaminase.

[0517] The adenosine deaminase can be derived from any suitable organism (e.g., E. coli). In some embodiments, the adenine deaminase is a naturally-occurring adenosine deaminase that includes one or more mutations corresponding to any of the mutations provided herein (e.g., mutations in ecTadA). The corresponding residue in any homologous protein can be identified by e.g., sequence alignment and determination of homologous residues. The mutations in any naturally-occurring adenosine deaminase (e.g., having homology to ecTadA) that corresponds to any of the mutations described herein (e.g., any of the mutations identified in ecTadA) can be generated accordingly.

### Adenosine Deaminases

[0518] In some embodiments, a base editor described herein can comprise a deaminase domain which includes an adenosine deaminase. Such an adenosine deaminase domain of a base editor can facilitate the editing of an adenine (A) nucleobase to a guanine (G) nucleobase by deaminating the A to form inosine (I), which exhibits base pairing properties of G. Adenosine deaminase is capable of deaminating (i.e., removing an amine group) adenine of a deoxyadenosine residue in deoxyribonucleic acid (DNA).

[0519] In some embodiments, the adenosine deaminases provided herein are capable of deaminating adenine. In some embodiments, the adenosine deaminases provided herein are capable of deaminating adenine in a deoxyadenosine residue of DNA. In some embodiments, the adenine deaminase is a naturally-occurring adenosine deaminase that includes one or more mutations corresponding to any of the mutations provided herein (e.g., mutations in ecTadA). One of skill in the art will be able to identify the corresponding residue in any homologous protein, e.g., by sequence alignment and determination of homologous residues. Accordingly, one of skill in the art would be able to generate mutations in any naturally-occurring adenosine deaminase (e.g., having homology to ecTadA) that corresponds to any of the mutations described herein, e.g., any of the mutations identified in ecTadA. In some embodiments, the adenosine deaminase is from a prokaryote. In some embodiments, the adenosine deaminase is from a bacterium. In some embodiments, the adenosine deaminase is from Escherichia coli, Staphylococcus aureus, Salmonella typhi, Shewanella putrefaciens, Haemophilus influenzae, Caulobacter crescentus, or Bacillus subtilis. In some embodiments, the adenosine deaminase is from E. coli.

[0520] The invention provides adenosine deaminase variants that have increased efficiency (>50-60%) and specificity. In particular, the adenosine deaminase variants described herein are more likely to edit a desired base within a polynucleotide, and are less likely to edit bases that are not intended to be altered (i.e., “bystanders”).

[0521] In particular embodiments, the TadA is any one of the TadA described in PCT/US2017/045381 (WO 2018/027078), which is incorporated herein by reference in its entirety.

[0522] In some embodiments, the nucleobase editors of the invention are adenosine deaminase variants comprising an alteration in the following sequence:

(SEQ ID NO: 20)
MSEVEFSHEYWMRHALTLAKRARDEREVPVGAVLVLNNRVIGEGWNRAIG
LHDPTAHAEIMALRQGGLVMQNYRLIDATLYVTFEPCVMCAGAMIHSRIG
RVVFGVRNAKTGAAGSLMDVLHYPGMNHRVEITEGILADECAALLCYFFR
MPRQVFNAQKKAQSSTD
(also termed TadA*7.10).

[0523] In particular embodiments, the fusion proteins comprise a single (e.g., provided as a monomer) TadA*8 variant. In some embodiments, the TadA*8 is linked to a Cas9 nickase. In some embodiments, the fusion proteins of the invention comprise as a heterodimer of a wild-type TadA (TadA(wt)) linked to a TadA*8 variant. In other embodiments, the fusion proteins of the invention comprise as a heterodimer of a TadA*7.10 linked to a TadA*8 variant. In some embodiments, the base editor is ABE8 comprising a TadA*8 variant monomer. In some embodiments, the base editor is ABE8 comprising a heterodimer of a TadA*8 variant and a TadA(wt). In some embodiments, the base editor is ABE8 comprising a heterodimer of a TadA*8 variant and TadA*7.10. In some embodiments, the base editor is ABE8 comprising a heterodimer of a TadA*8 variant. In some embodiments, the TadA*8 variant is selected from Table 7. In some embodiments, the ABE8 is selected from Table 7. The relevant sequences follow:

Wild-type TadA (TadA(wt)) or “the TadA reference
sequence”
(SEQ ID NO: 2)
MSEVEFSHEYWMRHALTLAKRAWDEREVPVGAVLVHNNRVIGEGWNRPIG
RHDPTAHAEIMALRQGGLVMQNYRLIDATLYVTLEPCVMCAGAMIHSRIG
RVVFGARDAKTGAAGSLMDVLHHPGMNHRVEITEGILADECAALLSDFFR
MRRQEIKAQKKAQSSTD
TadA*7.10:
(SEQ ID NO: 20)
MSEVEFSHEYW MRHALTLAKR ARDEREVPVG AVLVLNNRVI
GEGWNRAIGL HDPTAHAEIM ALRQGGLVMQ NYRLIDATLY
VTFEPCVMCA GAMIHSRIGR VVFGVRNAKT GAAGSLMDVL
HYPGMNHRVE ITEGILADEC AALLCYFFRM PRQVFNAQKK
AQSSTD

[0524] In some embodiments, the adenosine deaminase comprises an amino acid sequence that is at least 60%, at least 65%, at least 70%, at least 75%, at least 80%, at least 85%, at least 90%, at least 95%, at least 96%, at least 97%, at least 98%, at least 99%, or at least 99.5% identical to any one of the amino acid sequences set forth in any of the adenosine deaminases provided herein. It should be appreciated that adenosine deaminases provided herein may include one or more mutations (e.g., any of the mutations provided herein). The disclosure provides any deaminase domains with a certain percent identity plus any of the mutations or combinations thereof described herein. In some embodiments, the adenosine deaminase comprises an amino acid sequence that has 1, 2, 3, 4, 5, 6, 7, 8, 9, 10, 11, 12, 13, 14, 15, 16, 17, 18, 19, 20, 21, 22, 21, 24, 25, 26, 27, 28, 29, 30, 31, 32, 33, 34, 35, 36, 37, 38, 39, 40, 41, 42, 43, 44, 45, 46, 47, 48, 49, 50, or more mutations compared to a reference sequence, or any of the adenosine deaminases provided herein. In some embodiments, the adenosine deaminase comprises an amino acid sequence that has at least 5, at least 10, at least 15, at least 20, at least 25, at least 30, at least 35, at least 40, at least 45, at least 50, at least 60, at least 70, at least 80, at least 90, at least 100, at least 110, at least 120, at least 130, at least 140, at least 150, at least 160, or at least 170 identical contiguous amino acid residues as compared to any one of the amino acid sequences known in the art or described herein.

[0525] In some embodiments the TadA deaminase is a full-length E. coli TadA deaminase. For example, in certain embodiments, the adenosine deaminase comprises the amino acid sequence:

(SEQ ID NO: 22)
MRRAFITGVFFLSEVEFSHEYWMRHALTLAKRAWDEREVPVGAVLVHNNR
VIGEGWNRPIGRHDPTAHAEIMALRQGGLVMQNYRLIDATLYVTLEPCVM
CAGAMIHSRIGRVVFGARDAKTGAAGSLMDVLHHPGMNHRVEITEGILAD
ECAALLSDFFRMRRQEIKAQKKAQSSTD.

[0526] It should be appreciated, however, that additional adenosine deaminases useful in the present application would be apparent to the skilled artisan and are within the scope of this disclosure. For example, the adenosine deaminase may be a homolog of adenosine deaminase acting on tRNA (ADAT). Without limitation, the amino acid sequences of exemplary AD AT homologs include the following:

Staphylococcus aureus TadA:
(SEQ ID NO: 23)
MGSHMTNDIYFMTLAIEEAKKAAQLGEVPIGAIITKDDEVIARAHNLRET
LQQPTAHAEHIAIERAAKVLGSWRLEGCTLYVTLEPCVMCAGTIVMSRIP
RVVYGADDPKGGCSGSLMNLLQQSNFNHRAIVDKGVLKEACSTLLTTFFK
NLRANKKSTN
Bacillus subtilis TadA:
(SEQ ID NO: 24)
MTQDELYMKEAIKEAKKAEEKGEVPIGAVLVINGEIIARAHNLRETEQRS
IAHAEMLVIDEACKALGTWRLEGATLYVTLEPCPMCAGAVVLSRVEKVVF
GAFDPKGGCSGTLMNLLQEERFNHQAEVVSGVLEEECGGMLSAFFRELRK
KKKAARKNLSE
Salmonella typhimurium (S. typhimurium) TadA:
(SEQ ID NO: 25)
MPPAFITGVTSLSDVELDHEYWMRHALTLAKRAWDEREVPVGAVLVHNHR
VIGEGWNRPIGRHDPTAHAEIMALRQGGLVLQNYRLLDTTLYVTLEPCVM
CAGAMVHSRIGRVVFGARDAKTGAAGSLIDVLHHPGMNHRVEIIEGVLRD
ECATLLSDFFRMRRQEIKALKKADRAEGAGPAV
Shewanella putrefaciens (S. putrefaciens) TadA:
(SEQ ID NO: 26)
MDEYWMQVAMQMAEKAEAAGEVPVGAVLVKDGQQIATGYNLSISQHDPTA
HAEILCLRSAGKKLENYRLLDATLYITLEPCAMCAGAMVHSRIARVVYGA
RDEKTGAAGTVVNLLQHPAFNHQVEVTSGVLAEACSAQLSRFFKRRRDEK
KALKLAQRAQQGIE
Haemophilus influenzae F3031 (H. influenzae) TadA:
(SEQ ID NO: 27)
MDAAKVRSEFDEKMMRYALELADKAEALGEIPVGAVLVDDARNIIGEGWN
LSIVQSDPTAHAEIIALRNGAKNIQNYRLLNSTLYVTLEPCTMCAGAILH
SRIKRLVFGASDYKTGAIGSRFHFFDDYKMNHTLEITSGVLAEECSQKLS
TFFQKRREEKKIEKALLKSLSDK
Caulobacter crescentus (C. crescentus) TadA:
(SEQ ID NO: 28)
MRTDESEDQDHRMMRLALDAARAAAEAGETPVGAVILDPSTGEVIATAGN
GPIAAHDPTAHAEIAAMRAAAAKLGNYRLTDLTLVVTLEPCAMCAGAISH
ARIGRVVFGADDPKGGAWHGPKFFAQPTCHWRPEVTGGVLADESADLLRG
FFRARRKAKI
Geobacter sulfurreducens (G. sulfurreducens) TadA:
(SEQ ID NO: 29)
MSSLKKTPIRDDAYWMGKAIREAAKAAARDEVPIGAVIVRDGAVIGRGHN
LREGSNDPSAHAEMIAIRQAARRSANWRLTGATLYVTLEPCLMCMGAIIL
ARLERVVFGCYDPKGGAAGSLYDLSADPRLNHQVRLSPGVCQEECGTMLS
DFFRDLRRRKKAKATPALFIDERKVPPEP
An embodiment of E. Coli TadA (ecTadA) includes
the following:
(SEQ ID NO: 153)
MSEVEFSHEYWMRHALTLAKRARDEREVPVGAVLVLNNRVIGEGWNRAIG
LHDPTAHAEIMALRQGGLVMQNYRLIDATLYVTFEPCVMCAGAMIHSRIG
RVVFGVRNAKTGAAGSLMDVLHYPGMNHRVEITEGILADECAALLCYFFR
MPRQVFNAQKKAQSSTD

[0527] In some embodiments, the adenosine deaminase is from a prokaryote. In some embodiments, the adenosine deaminase is from a bacterium. In some embodiments, the adenosine deaminase is from Escherichia coli, Staphylococcus aureus, Salmonella typhi, Shewanella putrefaciens, Haemophilus influenzae, Caulobacter crescentus, or Bacillus subtilis. In some embodiments, the adenosine deaminase is from E. coli.

[0528] In one embodiment, a fusion protein of the invention comprises a wild-type TadA linked to TadA7.10, which is linked to Cas9 nickase. In particular embodiments, the fusion proteins comprise a single TadA7.10 domain (e.g., provided as a monomer). In other embodiments, the ABE7.10 editor comprises TadA7.10 and TadA(wt), which are capable of forming heterodimers.

[0529] In some embodiments, the adenosine deaminase comprises an amino acid sequence that is at least 60%, at least 65%, at least 70%, at least 75%, at least 80%, at least 85%, at least 90%, at least 95%, at least 96%, at least 97%, at least 98%, at least 99%, or at least 99.5% identical to any one of the amino acid sequences set forth in any of the adenosine deaminases provided herein. It should be appreciated that adenosine deaminases provided herein may include one or more mutations (e.g., any of the mutations provided herein). The disclosure provides any deaminase domains with a certain percent identity plus any of the mutations or combinations thereof described herein. In some embodiments, the adenosine deaminase comprises an amino acid sequence that has 1, 2, 3, 4, 5, 6, 7, 8, 9, 10, 11, 12, 13, 14, 15, 16, 17, 18, 19, 20, 21, 22, 21, 24, 25, 26, 27, 28, 29, 30, 31, 32, 33, 34, 35, 36, 37, 38, 39, 40, 41, 42, 43, 44, 45, 46, 47, 48, 49, 50, or more mutations compared to a reference sequence, or any of the adenosine deaminases provided herein. In some embodiments, the adenosine deaminase comprises an amino acid sequence that has at least 5, at least 10, at least 15, at least 20, at least 25, at least 30, at least 35, at least 40, at least 45, at least 50, at least 60, at least 70, at least 80, at least 90, at least 100, at least 110, at least 120, at least 130, at least 140, at least 150, at least 160, or at least 170 identical contiguous amino acid residues as compared to any one of the amino acid sequences known in the art or described herein.

[0530] It should be appreciated that any of the mutations provided herein (e.g., based on the TadA reference sequence) can be introduced into other adenosine deaminases, such as E. coli TadA (ecTadA), S. aureus TadA (saTadA), or other adenosine deaminases (e.g., bacterial adenosine deaminases). It would be apparent to the skilled artisan that additional deaminases may similarly be aligned to identify homologous amino acid residues that can be mutated as provided herein. Thus, any of the mutations identified in the TadA reference sequence can be made in other adenosine deaminases (e.g., ecTadA) that have homologous amino acid residues. It should also be appreciated that any of the mutations provided herein can be made individually or in any combination in the TadA reference sequence or another adenosine deaminase. It should be appreciated that the amino acid substitutions in a TadA variant are as numbered in the TadA reference sequence (SEQ ID NO: 2), and can be a corresponding amino acid substitution or position in any other TadA variant that have homologous amino acid residues. It should be appreciated that the numbering of the specific positions or residues in the respective sequences depends on the particular protein and numbering scheme used; numbering might be different in a TadA varaiant sharing homology with the TadA reference sequence, and differences in sequences from species to species may affect numbering. One of skill in the art will be able to identify the respective residue in any homologous protein and in the respective encoding nucleic acid by methods well known in the art, e.g., by sequence alignment and determination of homologous residues.

[0531] In some embodiments, the adenosine deaminase comprises a D108X mutation in the TadA reference sequence, or a corresponding mutation in another adenosine deaminase (e.g., ecTadA), where X indicates any amino acid other than the corresponding amino acid in the wild-type adenosine deaminase. In some embodiments, the adenosine deaminase comprises a D108G, D108N, D108V, D108A, or D108Y mutation, or a corresponding mutation in another adenosine deaminase.

[0532] In some embodiments, the adenosine deaminase comprises an A106X mutation in TadA reference sequence, or a corresponding mutation in another adenosine deaminase (e.g., ecTadA), where X indicates any amino acid other than the corresponding amino acid in the wild-type adenosine deaminase. In some embodiments, the adenosine deaminase comprises an A106V mutation in TadA reference sequence, or a corresponding mutation in another adenosine deaminase (e.g., wild-type TadA or ecTadA).

[0533] In some embodiments, the adenosine deaminase comprises a E155X mutation in TadA reference sequence, or a corresponding mutation in another adenosine deaminase (e.g., ecTadA), where the presence of X indicates any amino acid other than the corresponding amino acid in the wild-type adenosine deaminase. In some embodiments, the adenosine deaminase comprises a E155D, E155G, or E155V mutation in TadA reference sequence, or a corresponding mutation in another adenosine deaminase (e.g., ecTadA).

[0534] In some embodiments, the adenosine deaminase comprises a D147X mutation in TadA reference sequence, or a corresponding mutation in another adenosine deaminase (e.g., ecTadA), where the presence of X indicates any amino acid other than the corresponding amino acid in the wild-type adenosine deaminase. In some embodiments, the adenosine deaminase comprises a D147Y, mutation in TadA reference sequence, or a corresponding mutation in another adenosine deaminase (e.g., ecTadA).

[0535] In some embodiments, the adenosine deaminase comprises an A106X, E155X, or D147X, mutation in the TadA reference sequence, or a corresponding mutation in another adenosine deaminase (e.g., ecTadA), where X indicates any amino acid other than the corresponding amino acid in the wild-type adenosine deaminase. In some embodiments, the adenosine deaminase comprises an E155D, E155G, or E155V mutation. In some embodiments, the adenosine deaminase comprises a D147Y.

[0536] For example, an adenosine deaminase can contain a D108N, a A106V, a E155V, and/or a D147Y mutation in TadA reference sequence, or a corresponding mutation in another adenosine deaminase (e.g., ecTadA). In some embodiments, an adenosine deaminase comprises the following group of mutations (groups of mutations are separated by a “;”) in TadA reference sequence, or corresponding mutations in another adenosine deaminase (e.g., ecTadA): D108N and A106V; D108N and E155V; D108N and D147Y; A106V and E155V; A106V and D147Y; E155V and D147Y; D108N, A106V, and E155V; D108N, A106V, and D147Y; D108N, E155V, and D147Y; A106V, E155V, and D 147Y; and D108N, A106V, E155V, and D147Y. It should be appreciated, however, that any combination of corresponding mutations provided herein can be made in an adenosine deaminase (e.g., ecTadA).

[0537] In some embodiments, the adenosine deaminase comprises one or more of a H8X, T17X, L18X, W23X, L34X, W45X, R51X, A56X, E59X, E85X, M94X, I95X, V102X, F104X, A106X, R107X, D108X, K110X, M118X, N127X, A138X, F149X, M151X, R153X, Q154X, I156X, and/or K157X mutation in TadA reference sequence, or one or more corresponding mutations in another adenosine deaminase (e.g., ecTadA), where the presence of X indicates any amino acid other than the corresponding amino acid in the wild-type adenosine deaminase. In some embodiments, the adenosine deaminase comprises one or more of H8Y, T17S, L18E, W23L, L34S, W45L, R51H, A56E, or A56S, E59G, E85K, or E85G, M94L, I95L, V102A, F104L, A106V, R107C, or R107H, or R107P, D108G, or D108N, or D108V, or D108A, or D108Y, K110I, M118K, N127S, A138V, F149Y, M151V, R153C, Q154L, I156D, and/or K157R mutation in TadA reference sequence, or one or more corresponding mutations in another adenosine deaminase (e.g., ecTadA).

[0538] In some embodiments, the adenosine deaminase comprises one or more of a H8X, D108X, and/or N127X mutation in TadA reference sequence, or one or more corresponding mutations in another adenosine deaminase (e.g., ecTadA), where X indicates the presence of any amino acid. In some embodiments, the adenosine deaminase comprises one or more of a H8Y, D108N, and/or N127S mutation in TadA reference sequence, or one or more corresponding mutations in another adenosine deaminase (e.g., ecTadA).

[0539] In some embodiments, the adenosine deaminase comprises one or more of H8X, R26X, M61X, L68X, M70X, A106X, D108X, A109X, N127X, D147X, R152X, Q154X, E155X, K161X, Q163X, and/or T166X mutation in TadA reference sequence, or one or more corresponding mutations in another adenosine deaminase (e.g., ecTadA), where X indicates the presence of any amino acid other than the corresponding amino acid in the wild-type adenosine deaminase. In some embodiments, the adenosine deaminase comprises one or more of H8Y, R26W, M61I, L68Q, M70V, A106T, D108N, A109T, N127S, D147Y, R152C, Q154H or Q154R, E155G or E155V or E155D, K161Q, Q163H, and/or T166P mutation in TadA reference sequence, or one or more corresponding mutations in another adenosine deaminase (e.g., ecTadA).

[0540] In some embodiments, the adenosine deaminase comprises one, two, three, four, five, or six mutations selected from the group consisting of H8X, D108X, N127X, D147X, R152X, and Q154X in TadA reference sequence, or a corresponding mutation or mutations in another adenosine deaminase (e.g., ecTadA), where X indicates the presence of any amino acid other than the corresponding amino acid in the wild-type adenosine deaminase. In some embodiments, the adenosine deaminase comprises one, two, three, four, five, six, seven, or eight mutations selected from the group consisting of H8X, M61X, M70X, D108X, N127X, Q154X, E155X, and Q163X in TadA reference sequence, or a corresponding mutation or mutations in another adenosine deaminase (e.g., ecTadA), where X indicates the presence of any amino acid other than the corresponding amino acid in the wild-type adenosine deaminase. In some embodiments, the adenosine deaminase comprises one, two, three, four, or five, mutations selected from the group consisting of H8X, D108X, N127X, E155X, and T166X in TadA reference sequence, or a corresponding mutation or mutations in another adenosine deaminase (e.g., ecTadA), where X indicates the presence of any amino acid other than the corresponding amino acid in the wild-type adenosine deaminase.

[0541] In some embodiments, the adenosine deaminase comprises one, two, three, four, five, or six mutations selected from the group consisting of H8X, A106X, D108X, mutation or mutations in another adenosine deaminase, where X indicates the presence of any amino acid other than the corresponding amino acid in the wild-type adenosine deaminase. In some embodiments, the adenosine deaminase comprises one, two, three, four, five, six, seven, or eight mutations selected from the group consisting of H8X, R26X, L68X, D108X, N127X, D147X, and E155X, or a corresponding mutation or mutations in another adenosine deaminase, where X indicates the presence of any amino acid other than the corresponding amino acid in the wild-type adenosine deaminase. In some embodiments, the adenosine deaminase comprises one, two, three, four, or five, mutations selected from the group consisting of H8X, D108X, A109X, N127X, and E155X in TadA reference sequence, or a corresponding mutation or mutations in another adenosine deaminase (e.g., ecTadA), where X indicates the presence of any amino acid other than the corresponding amino acid in the wild-type adenosine deaminase.

[0542] In some embodiments, the adenosine deaminase comprises one, two, three, four, five, or six mutations selected from the group consisting of H8Y, D108N, N127S, D147Y, R152C, and Q154H in TadA reference sequence, or a corresponding mutation or mutations in another adenosine deaminase (e.g., ecTadA). In some embodiments, the adenosine deaminase comprises one, two, three, four, five, six, seven, or eight mutations selected from the group consisting of H8Y, M61I, M70V, D108N, N127S, Q154R, E155G and Q163H in TadA reference sequence, or a corresponding mutation or mutations in another adenosine deaminase (e.g., ecTadA). In some embodiments, the adenosine deaminase comprises one, two, three, four, or five, mutations selected from the group consisting of H8Y, D108N, N127S, E155V, and T166P in TadA reference sequence, or a corresponding mutation or mutations in another adenosine deaminase (e.g., ecTadA). In some embodiments, the adenosine deaminase comprises one, two, three, four, five, or six mutations selected from the group consisting of H8Y, A106T, D108N, N127S, E155D, and K161Q in TadA reference sequence, or a corresponding mutation or mutations in another adenosine deaminase (e.g., ecTadA). In some embodiments, the adenosine deaminase comprises one, two, three, four, five, six, seven, or eight mutations selected from the group consisting of H8Y, R26W, L68Q, D108N, N127S, D147Y, and E155V in TadA reference sequence, or a corresponding mutation or mutations in another adenosine deaminase (e.g., ecTadA). In some embodiments, the adenosine deaminase comprises one, two, three, four, or five, mutations selected from the group consisting of H8Y, D108N, A109T, N127S, and E155G in TadA reference sequence, or a corresponding mutation or mutations in another adenosine deaminase (e.g., ecTadA).

[0543] Any of the mutations provided herein and any additional mutations (e.g., based on the ecTadA amino acid sequence) can be introduced into any other adenosine deaminases. Any of the mutations provided herein can be made individually or in any combination in TadA reference sequence or another adenosine deaminase (e.g., ecTadA).

[0544] Details of A to G nucleobase editing proteins are described in International PCT Application No. PCT/2017/045381 (WO2018/027078) and Gaudelli, N. M., et al., “Programmable base editing of A•T to G•C in genomic DNA without DNA cleavage” Nature, 551, 464-471 (2017), the entire contents of which are hereby incorporated by reference.

[0545] In some embodiments, the adenosine deaminase comprises one or more corresponding mutations in another adenosine deaminase (e.g., ecTadA). In some embodiments, the adenosine deaminase comprises a D108N, D108G, or D108V mutation in TadA reference sequence, or corresponding mutations in another adenosine deaminase (e.g., ecTadA). In some embodiments, the adenosine deaminase comprises a A106V and D108N mutation in TadA reference sequence, or corresponding mutations in another adenosine deaminase (e.g., ecTadA). In some embodiments, the adenosine deaminase comprises R107C and D108N mutations in TadA reference sequence, or corresponding mutations in another adenosine deaminase (e.g., ecTadA). In some embodiments, the adenosine deaminase comprises a H8Y, D108N, N127S, D147Y, and Q154H mutation in TadA reference sequence, or corresponding mutations in another adenosine deaminase (e.g., ecTadA). In some embodiments, the adenosine deaminase comprises a H8Y, D108N, N127S, D147Y, and E155V mutation in TadA reference sequence, or corresponding mutations in another adenosine deaminase (e.g., ecTadA). In some embodiments, the adenosine deaminase comprises a D108N, D147Y, and E155V mutation in TadA reference sequence, or corresponding mutations in another adenosine deaminase (e.g., ecTadA). In some embodiments, the adenosine deaminase comprises a H8Y, D108N, and N127S mutation in TadA reference sequence, or corresponding mutations in another adenosine deaminase (e.g., ecTadA). In some embodiments, the adenosine deaminase comprises a A106V, D108N, D147Y and E155V mutation in TadA reference sequence, or corresponding mutations in another adenosine deaminase (e.g., ecTadA).

[0546] In some embodiments, the adenosine deaminase comprises one or more of a S2X, H8X, I49X, L84X, H123X, N127X, I156X and/or K160X mutation in TadA reference sequence, or one or more corresponding mutations in another adenosine deaminase, where the presence of X indicates any amino acid other than the corresponding amino acid in the wild-type adenosine deaminase. In some embodiments, the adenosine deaminase comprises one or more of S2A, H8Y, I49F, L84F, H123Y, N127S, I156F and/or K160S mutation in TadA reference sequence, or one or more corresponding mutations in another adenosine deaminase (e.g., ecTadA).

[0547] In some embodiments, the adenosine deaminase comprises an L84X mutation adenosine deaminase, where X indicates any amino acid other than the corresponding amino acid in the wild-type adenosine deaminase. In some embodiments, the adenosine deaminase comprises an L84F mutation in TadA reference sequence, or a corresponding mutation in another adenosine deaminase (e.g., ecTadA).

[0548] In some embodiments, the adenosine deaminase comprises an H123X mutation in TadA reference sequence, or a corresponding mutation in another adenosine deaminase (e.g., ecTadA), where X indicates any amino acid other than the corresponding amino acid in the wild-type adenosine deaminase. In some embodiments, the adenosine deaminase comprises an H123Y mutation in TadA reference sequence, or a corresponding mutation in another adenosine deaminase (e.g., ecTadA).

[0549] In some embodiments, the adenosine deaminase comprises an I156X mutation in TadA reference sequence, or a corresponding mutation in another adenosine deaminase (e.g., ecTadA), where X indicates any amino acid other than the corresponding amino acid in the wild-type adenosine deaminase. In some embodiments, the adenosine deaminase comprises an I156F mutation in TadA reference sequence, or a corresponding mutation in another adenosine deaminase (e.g., ecTadA).

[0550] In some embodiments, the adenosine deaminase comprises one, two, three, four, five, six, or seven mutations selected from the group consisting of L84X, A106X, D108X, H123X, D147X, E155X, and I156X in TadA reference sequence, or a corresponding mutation or mutations in another adenosine deaminase (e.g., ecTadA), where X indicates the presence of any amino acid other than the corresponding amino acid in the wild-type adenosine deaminase. In some embodiments, the adenosine deaminase comprises one, two, three, four, five, or six mutations selected from the group consisting of S2X, I49X, A106X, D108X, D147X, and E155X in TadA reference sequence, or a corresponding mutation or mutations in another adenosine deaminase (e.g., ecTadA), where X indicates the presence of any amino acid other than the corresponding amino acid in the wild-type adenosine deaminase. In some embodiments, the adenosine deaminase comprises one, two, three, four, or five, mutations selected from the group consisting of H8X, A106X, D108X, N127X, and K160X in TadA reference sequence, or a corresponding mutation or mutations in another adenosine deaminase (e.g., ecTadA), where X indicates the presence of any amino acid other than the corresponding amino acid in the wild-type adenosine deaminase.

[0551] In some embodiments, the adenosine deaminase comprises one, two, three, four, five, six, or seven mutations selected from the group consisting of L84F, A106V, D108N, H123Y, D147Y, E155V, and I156F in TadA reference sequence, or a corresponding mutation or mutations in another adenosine deaminase (e.g., ecTadA). In some embodiments, the adenosine deaminase comprises one, two, three, four, five, or six mutations selected from the group consisting of S2A, I49F, A106V, D108N, D147Y, and E155V in TadA reference sequence.

[0552] In some embodiments, the adenosine deaminase comprises one, two, three, four, or five, mutations selected from the group consisting of H8Y, A106T, D108N, N127S, and K160S in TadA reference sequence, or a corresponding mutation or mutations in another adenosine deaminase (e.g., ecTadA).

[0553] In some embodiments, the adenosine deaminase comprises one or more of a E25X, R26X, R107X, A142X, and/or A143X mutation in TadA reference sequence, or one or more corresponding mutations in another adenosine deaminase (e.g., ecTadA), where the presence of X indicates any amino acid other than the corresponding amino acid in the wild-type adenosine deaminase. In some embodiments, the adenosine deaminase comprises one or more of E25M, E25D, E25A, E25R, E25V, E25S, E25Y, R26G, R26N, R26Q, R26C, R26L, R26K, R107P, R107K, R107A, R107N, R107W, R107H, R107S, A142N, A142D, A142G, A143D, A143G, A143E, A143L, A143W, A143M, A143S, A143Q and/or A143R mutation in TadA reference sequence, or one or more corresponding mutations in another adenosine deaminase (e.g., ecTadA). In some embodiments, the adenosine deaminase comprises one or more of the mutations described herein corresponding to TadA reference sequence, or one or more corresponding mutations in another adenosine deaminase (e.g., ecTadA).

[0554] In some embodiments, the adenosine deaminase comprises an E25X mutation in TadA reference sequence, or a corresponding mutation in another adenosine deaminase (e.g., ecTadA), where X indicates any amino acid other than the corresponding amino acid in the wild-type adenosine deaminase. In some embodiments, the adenosine deaminase comprises an E25M, E25D, E25A, E25R, E25V, E25S, or E25Y mutation in TadA reference sequence, or a corresponding mutation in another adenosine deaminase (e.g., ecTadA).

[0555] In some embodiments, the adenosine deaminase comprises an R26X mutation in TadA reference sequence, or a corresponding mutation in another adenosine deaminase (e.g., ecTadA), where X indicates any amino acid other than the corresponding amino acid in the wild-type adenosine deaminase. In some embodiments, the adenosine deaminase comprises R26G, R26N, R26Q, R26C, R26L, or R26K mutation in TadA reference sequence, or a corresponding mutation in another adenosine deaminase (e.g., ecTadA).

[0556] In some embodiments, the adenosine deaminase comprises an R107X mutation in TadA reference sequence, or a corresponding mutation in another adenosine deaminase (e.g., ecTadA), where X indicates any amino acid other than the corresponding amino acid in the wild-type adenosine deaminase. In some embodiments, the adenosine deaminase comprises an R107P, R107K, R107A, R107N, R107W, R107H, or R107S mutation in TadA reference sequence, or a corresponding mutation in another adenosine deaminase (e.g., ecTadA).

[0557] In some embodiments, the adenosine deaminase comprises an A142X mutation in TadA reference sequence, or a corresponding mutation in another adenosine deaminase (e.g., ecTadA), where X indicates any amino acid other than the corresponding amino acid in the wild-type adenosine deaminase. In some embodiments, the adenosine deaminase comprises an A142N, A142D, A142G, mutation in TadA reference sequence, or a corresponding mutation in another adenosine deaminase (e.g., ecTadA).

[0558] In some embodiments, the adenosine deaminase comprises an A143X mutation in TadA reference sequence, or a corresponding mutation in another adenosine deaminase (e.g., ecTadA), where X indicates any amino acid other than the corresponding amino acid in the wild-type adenosine deaminase. In some embodiments, the adenosine deaminase comprises an A143D, A143G, A143E, A143L, A143W, A143M, A143S, A143Q and/or A143R mutation in TadA reference sequence, or a corresponding mutation in another adenosine deaminase (e.g., ecTadA).

[0559] In some embodiments, the adenosine deaminase comprises one or more of a H36X, N37X, P48X, I49X, R51X, M70X, N72X, D77X, E134X, S 146X, Q154X, K157X, and/or K161X mutation in TadA reference sequence, or one or more corresponding mutations in another adenosine deaminase (e.g., ecTadA), where the presence of X indicates any amino acid other than the corresponding amino acid in the wild-type adenosine deaminase. In some embodiments, the adenosine deaminase comprises one or more of H36L, N37T, N37S, P48T, P48L, I49V, R51H, R51L, M70L, N72S, D77G, E134G, S146R, S146C, Q154H, K157N, and/or K161T mutation in TadA reference sequence, or one or more corresponding mutations in another adenosine deaminase (e.g., ecTadA).

[0560] In some embodiments, the adenosine deaminase comprises an H36X mutation in TadA reference sequence, or a corresponding mutation in another adenosine deaminase (e.g., ecTadA), where X indicates any amino acid other than the corresponding amino acid in the wild-type adenosine deaminase. In some embodiments, the adenosine deaminase comprises an H36L mutation in TadA reference sequence, or a corresponding mutation in another adenosine deaminase (e.g., ecTadA).

[0561] In some embodiments, the adenosine deaminase comprises an N37X mutation in TadA reference sequence, or a corresponding mutation in another adenosine deaminase (e.g., ecTadA), where X indicates any amino acid other than the corresponding amino acid in the wild-type adenosine deaminase. In some embodiments, the adenosine deaminase comprises an N37T, or N37S mutation in TadA reference sequence, or a corresponding mutation in another adenosine deaminase (e.g., ecTadA).

[0562] In some embodiments, the adenosine deaminase comprises an P48X mutation in TadA reference sequence, or a corresponding mutation in another adenosine deaminase (e.g., ecTadA), where X indicates any amino acid other than the corresponding amino acid in the wild-type adenosine deaminase. In some embodiments, the adenosine deaminase comprises an P48T, or P48L mutation in TadA reference sequence, or a corresponding mutation in another adenosine deaminase (e.g., ecTadA).

[0563] In some embodiments, the adenosine deaminase comprises an R51X mutation in TadA reference sequence, or a corresponding mutation in another adenosine deaminase, where X indicates any amino acid other than the corresponding amino acid in the wild-type adenosine deaminase. In some embodiments, the adenosine deaminase comprises an R51H, or R51L mutation in TadA reference sequence, or a corresponding mutation in another adenosine deaminase (e.g., ecTadA).

[0564] In some embodiments, the adenosine deaminase comprises an S146X mutation in TadA reference sequence, or a corresponding mutation in another adenosine deaminase (e.g., ecTadA), where X indicates any amino acid other than the corresponding amino acid in the wild-type adenosine deaminase. In some embodiments, the adenosine deaminase comprises an S146R, or S146C mutation in TadA reference sequence, or a corresponding mutation in another adenosine deaminase (e.g., ecTadA).

[0565] In some embodiments, the adenosine deaminase comprises an K157X mutation in TadA reference sequence, or a corresponding mutation in another adenosine deaminase (e.g., ecTadA), where X indicates any amino acid other than the corresponding amino acid in the wild-type adenosine deaminase. In some embodiments, the adenosine deaminase comprises a K157N mutation in TadA reference sequence, or a corresponding mutation in another adenosine deaminase (e.g., ecTadA).

[0566] In some embodiments, the adenosine deaminase comprises an P48X mutation in TadA reference sequence, or a corresponding mutation in another adenosine deaminase (e.g., ecTadA), where X indicates any amino acid other than the corresponding amino acid in the wild-type adenosine deaminase. In some embodiments, the adenosine deaminase comprises a P48S, P48T, or P48A mutation in TadA reference sequence, or a corresponding mutation in another adenosine deaminase (e.g., ecTadA).

[0567] In some embodiments, the adenosine deaminase comprises an A142X mutation in TadA reference sequence, or a corresponding mutation in another adenosine deaminase (e.g., ecTadA), where X indicates any amino acid other than the corresponding amino acid in the wild-type adenosine deaminase. In some embodiments, the adenosine deaminase comprises a A142N mutation in TadA reference sequence, or a corresponding mutation in another adenosine deaminase (e.g., ecTadA).

[0568] In some embodiments, the adenosine deaminase comprises an W23X mutation in TadA reference sequence, or a corresponding mutation in another adenosine deaminase (e.g., ecTadA), where X indicates any amino acid other than the corresponding amino acid in the wild-type adenosine deaminase. In some embodiments, the adenosine deaminase comprises a W23R, or W23L mutation in TadA reference sequence, or a corresponding mutation in another adenosine deaminase (e.g., ecTadA).

[0569] In some embodiments, the adenosine deaminase comprises an R152X mutation in TadA reference sequence, or a corresponding mutation in another adenosine deaminase (e.g., ecTadA), where X indicates any amino acid other than the corresponding amino acid in the wild-type adenosine deaminase. In some embodiments, the adenosine deaminase comprises a R152P, or R52H mutation in TadA reference sequence, or a corresponding mutation in another adenosine deaminase (e.g., ecTadA).

[0570] In one embodiment, the adenosine deaminase may comprise the mutations H36L, R51L, L84F, A106V, D108N, H123Y, S146C, D147Y, E155V, I156F, and K157N. In some embodiments, the adenosine deaminase comprises the following combination of mutations relative to TadA reference sequence, where each mutation of a combination is separated by a “_” and each combination of mutations is between parentheses:

### (A106V_D108N),

### (R107C_D108N),

### (H8Y_D108N_N127S_D147Y_Q154H),

### (H8Y_D108N_N127S_D147Y_E155V),

### (D108N_D147Y_E155V),

### (H8Y_D108N_N127S),

### (H8Y_D108N_N127S_D147Y_Q154H),

### (A106V_D108N_D147Y_E155V),

### (D108Q_D147Y_E155V),

### (D108M_D147Y_E155V),

### (D108L_D147Y_E155V),

### (D108K_D147Y_E155V),

### (D108I_D147Y_E155V),

### (D108F_D147Y_E155V),

### (A106V_D108N_D147Y),

### (A106V_D108M_D147Y_E155V),

### (E59A_A106V_D108N_D147Y_E155V),

[0571] (E59A cat dead_A106V_D108N_D147Y_E155V),

### (L84F_A106V_D108N_H123Y_D147Y_E155V_I156Y),

### (L84F_A106V_D108N_H123Y_D147Y_E155V_I156F),

### (R26G_L84F_A106V_R107H_D108N_H123Y_A142N_A143D_D147Y_E155V_I156F),

### (E25G_R26G_L84F_A106V_R107H_D108N_H123Y_A142N_A143D_D147Y_E155V_I156F),

### (E25D_R26G_L84F_A106V_R107K_D108N_H123Y_A142N_A143G_D147Y_E155V_I156F),

### (R26Q_L84F_A106V_D108N_H123Y_A142N_D147Y_E155V_I156F),

### (E25M_R26G_L84F_A106V_R107P_D108N_H123Y_A142N_A143D_D147Y_E155V_I156F),

### (R26C_L84F_A106V_R107H_D108N_H123Y_A142N_D147Y_E155V_I156F),

### (L84F_A106V_D108N_H123Y_A142N_A143L_D147Y_E155V_I156F),

### (R26G_L84F_A106V_D108N_H123Y_A142N_D147Y_E155V_I156F),

### (E25A_R26G_L84F_A106V_R107N_D108N_H123Y_A142N_A143E_D147Y_E155V_I156F),

### (R26G_L84F_A106V_R107H_D108N_H123Y_A142N_A143D_D147Y_E155V_I156F),

### (A106V_D108N_A142N_D147Y_E155V),

### (R26G_A106V_D108N_A142N_D147Y_E155V),

### (E25D_R26G_A106V_R107K_D108N_A142N_A143G_D147Y_E155V),

### (R26G_A106V_D108N_R107H_A142N_A143D_D147Y_E155V),

### (E25D_R26G_A106V_D108N_A142N_D147Y_E155V),

### (A106V_R107K_D108N_A142N_D147Y_E155V),

### (A106V_D108N_A142N_A143G_D147Y_E155V),

### (A106V_D108N_A142N_A143L_D147Y_E155V),

### (H36L_R51L_L84F_A106V_D108N_H123Y_S146C_D147Y_E155V_I156F_K157N),

### (N37T_P48T_M70L_L84F_A106V_D108N_H123Y_D147Y_I49V_E155V_I156F),

### (N37S_L84F_A106V_D108N_H123Y_D147Y_E155V_I156F_K161T),

### (H36L_L84F_A106V_D108N_H123Y_D147Y_Q154H_E155V_I156F),

### (N72S_L84F_A106V_D108N_H123Y_S146R_D147Y_E155V_I156F),

### (H36L_P48L_L84F_A106V_D108N_H123Y_E134G_D147Y_E155V_I156F),

### (H36L_L84F_A106V_D108N_H123Y_D147Y_E155V_I156F_K157N),

### (H36L_L84F_A106V_D108N_H123Y_S146C_D147Y_E155V_I156F),

### (L84F_A106V_D108N_H123Y_S146R_D147Y_E155V_I156F_K161T),

### (N37S_R51H_D77G_L84F_A106V_D108N_H123Y_D147Y_E155V_I156F),

### (R51L_L84F_A106V_D108N_H123Y_D147Y_E155V_I156F_K157N),

### (D24G_Q71R_L84F_H96L_A106V_D108N_H123Y_D147Y_E155V_I156F_K160E),

### (H36L_G67V_L84F_A106V_D108N_H123Y_S146T_D147Y_E155V_I156F),

### (Q71L_L84F_A106V_D108N_H123Y_L137M_A143E_D147Y_E155V_I156F),

### (E25G_L84F_A106V_D108N_H123Y_D147Y_E155V_I156F_Q159L),

### (L84F_A91T_F104I_A106V_D108N_H123Y_D147Y_E155V_I156F),

### (N72D_L84F_A106V_D108N_H123Y_G125A_D147Y_E155V_I156F),

### (P48S_L84F_S97C_A106V_D108N_H123Y_D147Y_E155V_I156F),

### (W23G_L84F_A106V_D108N_H123Y_D147Y_E155V_I156F),

### (D24G_P48L_Q71R_L84F_A106V_D108N_H123Y_D147Y_E155V_I156F_Q159L),

### (L84F_A106V_D108N_H123Y_A142N_D147Y_E155V_I156F),

### (H36L_R51L_L84F_A106V_D108N_H123Y_A142N_S146C_D147Y_E155V_I156F_K157N), (N37S_L84F_A106V_D108N_H123Y_A142N_D147Y_E155V_I156F_K161T),

### (L84F_A106V_D108N_D147Y_E155V_I156F),

### (R51L_L84F_A106V_D108N_H123Y_S146C_D147Y_E155V_I156F_K157N_K161T),

### (L84F_A106V_D108N_H123Y_S146C_D147Y_E155V_I156F_K161T),

### (L84F_A106V_D108N_H123Y_S146C_D147Y_E155V_I156F_K157N_K160E_K161T),

### (L84F_A106V_D108N_H123Y_S146C_D147Y_E155V_I156F_K157N_K160E),

### (R74Q_L84F_A106V_D108N_H123Y_D147Y_E155V_I156F),

### (R74A_L84F_A106V_D108N_H123Y_D147Y_E155V_I156F),

### (L84F_A106V_D108N_H123Y_D147Y_E155V_I156F),

### (R74Q_L84F_A106V_D108N_H123Y_D147Y_E155V_I156F),

### (L84F_R98Q_A106V_D108N_H123Y_D147Y_E155V_I156F),

### (L84F_A106V_D108N_H123Y_R129Q_D147Y_E155V_I156F),

### (P48S_L84F_A106V_D108N_H123Y_A142N_D147Y_E155V_I156F),

### (P48S_A142N),

### (P48T_I49V_L84F_A106V_D108N_H123Y_A142N_D147Y_E155V_I156F_L157N),

### (P48T_I49V_A142N),

### (H36L_P48S_R51L_L84F_A106V_D108N_H123Y_S146C_D147Y_E155V_I156F_K157N),

### (H36L_P48S_R51L_L84F_A106V_D108N_H123Y_S146C_A142N_D147Y_E155V_I156F

### (H36L_P48T_I49V_R51L_L84F_A106V_D108N_H123Y_S146C_D147Y_E155V_I156F_K157N),

### (H36L_P48T_I49V_R51L_L84F_A106V_D108N_H123Y_A142N_S146C_D147Y_E155V_I156F_K157N),

### (H36L_P48A_R51L_L84F_A106V_D108N_H123Y_S146C_D147Y_E155V_I156F_K157N),

### (H36L_P48A_R51L_L84F_A106V_D108N_H123Y_A142N_S146C_D147Y_E155V_I156F_K157N),

### (H36L_P48A_R51L_L84F_A106V_D108N_H123Y_S146C_A142N_D147Y_E155V_I156F_K157N),

### (W23L_H36L_P48A_R51L_L84F_A106V_D108N_H123Y_S146C_D147Y_E155V_I156F_K157N),

### (W23R_H36L_P48A_R51L_L84F_A106V_D108N_H123Y_S146C_D147Y_E155V_I156F_K157N),

### (W23L_H36L_P48A_R51L_L84F_A106V_D108N_H123Y_S146R_D147Y_E155V_I156F_K161T),

### (H36L_P48A_R51L_L84F_A106V_D108N_H123Y_S146C_D147Y_R152H_E155V_I156F_K157N),

### (H36L_P48A_R51L_L84F_A106V_D108N_H123Y_S146C_D147Y_R152P_E155V_I156F_K157N),

### (W23L_H36L_P48A_R51L_L84F_A106V_D108N_H123Y_S146C_D147Y_R152P_E155V_I156F_K157N),

### (W23L_H36L_P48A_R51L_L84F_A106V_D108N_H123Y_A142A_S146C_D147Y_E155V_I156F_K157N),

### (W23L_H36L_P48A_R51L_L84F_A106V_D108N_H123Y_A142A_S146C_D147Y_R152P_E155V_I156F_K157N),

### (W23L_H36L_P48A_R51L_L84F_A106V_D108N_H123Y_S146R_D147Y_E155V_I156F_K161T),

### (W23R_H36L_P48A_R51L_L84F_A106V_D108N_H123Y_S146C_D147Y_R152P_E155V_I156F_K157N),

### (H36L_P48A_R51L_L84F_A106V_D108N_H123Y_A142N_S146C_D147Y_R152P_E155V_I156F_K157N).

[0572] In certain embodiments, the fusion proteins provided herein comprise one or more features that improve the base editing activity of the fusion proteins. For example, any of the fusion proteins provided herein may comprise a Cas9 domain that has reduced nuclease activity. In some embodiments, any of the fusion proteins provided herein may have a Cas9 domain that does not have nuclease activity (dCas9), or a Cas9 domain that cuts one strand of a duplexed DNA molecule, referred to as a Cas9 nickase (nCas9).

[0573] In some embodiments, the adenosine deaminase is TadA*7.10. In some embodiments, TadA*7.10 comprises at least one alteration. In particular embodiments, TadA*7.10 comprises one or more of the following alterations or additional alterations to TadA*7.10: Y147T, Y147R, Q154S, Y123H, V82S, T166R, and Q154R. The alteration Y123H is also referred to herein as H123H (the alteration H123Y in TadA*7.10 reverted back to Y123H (wt)). In other embodiments, the TadA*7.10 comprises a combination of alterations selected from the group of: Y147T+Q154R; Y147T+Q154S; Y147R+Q154S; V82S+Q154S; V82S+Y147R; V82S+Q154R; V82S+Y123H; I76Y+V82S; V82S+Y123H+Y147T; V82S+Y123H+Y147R; V82S+Y123H+Q154R; Y147R+Q154R+Y123H; Y147R+Q154R+I76Y; Y147R+Q154R+T166R; Y123H+Y147R+Q154R+I76Y; V82S+Y123H+Y147R+Q154R; and I76Y+V82S+Y123H+Y147R+Q154R. In particular embodiments, an adenosine deaminase variant comprises a deletion of the C terminus beginning at residue 149, 150, 151, 152, 153, 154, 155, 156, and 157.

[0574] In some embodiments, a TadA variant comprises at least one alteration relative to TadA7.10. In some embodiments, a TadA variant comprises at least one alteration relative to a wild type TadA. Amino acid alterations in a TadA variant may be any one of the amino acid substitutions as described herein relative to TadA7.10 or wild type TadA. In some embodiments, a TadA variant, e.g. a TadA8, comprises an amino acid alteration at amino acid position 23, 26, 36, 37, 48, 49, 51, 72, 84, 87, 105, 108, 123, 125, 142, 145, 147, 152, 155, 16, 157, 161, or any combination thereof. In some embodiments, the TadA variant comprises amino acid alteration V82X relative to TadA7.10, wherein X is any amino acid other than V. In some embodiments, the TadA variant comprises a V82S alteration relative to TadA7.10. In some embodiments, amino acid X is an acidic amino acid, a basic amino acid, or a neutral amino acid. In some embodiments, a TadA variant comprises amino acid alteration T166X relative to TadA7.10, wherein X is any amino acid other than T. In some embodiments, amino acid X is an acidic amino acid, a basic amino acid, or a neutral amino acid. In some embodiments, a TadA variant comprises amino acid alteration V82X, Y147X, Q154X, I76X, Y123X, R23X, L36X, A48X, L51X, F84X, V106X, N108X, Y123X, C146X, Y147X, P152X, Q154X, V155X, F156X, N157X, T166X relative to TadA7.10, or any combination thereof, wherein X is any amino acid other than the amino acid in TadA7.10. In some embodiments, X is an acidic amino acid, a basic amino acid, or a neutral amino acid. In some embodiments, X reverts the amino acid to a wild type amino acid in the TadA reference sequence.

[0575] In other embodiments, a base editor of the invention is a monomer comprising an adenosine deaminase variant (e.g., TadA*8) comprising one or more of the following alterations: Y147T, Y147R, Q154S, Y123H, V82S, T166R, and/or Q154R compared to TadA*7.10 or the reference TadA sequence. In other embodiments, the adenosine deaminase variant (TadA*8) is a monomer comprising a combination of alterations selected from the group of: Y147T+Q154R; Y147T+Q154S; Y147R+Q154S; V82S+Q154S; V82S+Y147R; V82S+Q154R; V82S+Y123H; I76Y+V82S; V82S+Y123H+Y147T; V82S+Y123H+Y147R; V82S+Y123H+Q154R; Y147R+Q154R+Y123H; Y147R+Q154R+I76Y; Y147R+Q154R+T166R; Y123H+Y147R+Q154R+I76Y; V82S+Y123H+Y147R+Q154R; and I76Y+V82S+Y123H+Y147R+Q154R. In other embodiments, a base editor is a heterodimer comprising a wild-type adenosine deaminase and an adenosine deaminase variant (e.g., TadA*8) comprising one or more of the following alterations Y147T, Y147R, Q154S, Y123H, V82S, T166R, and/or Q154R. In other embodiments, the base editor is a heterodimer comprising a TadA*7.10 domain and an adenosine deaminase variant domain (e.g., TadA*8) comprising a combination of alterations selected from the group of: Y147T+Q154R; Y147T+Q154S; Y147R+Q154S; V82S+Q154S; V82S+Y147R; V82S+Q154R; V82S+Y123H; I76Y+V82S; V82S+Y123H+Y147T; V82S+Y123H+Y147R; V82S+Y123H+Q154R; Y147R+Q154R+Y123H; Y147R+Q154R+I76Y; Y147R+Q154R+T166R; Y123H+Y147R+Q154R+I76Y; V82S+Y123H+Y147R+Q154R; and I76Y+V82S+Y123H+Y147R+Q154R.

[0576] In one embodiment, an adenosine deaminase is a TadA*8 that comprises or consists essentially of the following sequence or a fragment thereof having adenosine deaminase activity:

(SEQ ID NO: 21)
MSEVEFSHEYWMRHALTLAKRARDEREVPVGAVLVLNNRVIGEGWNRAIG
LHDPTAHAEIMALRQGGLVMQNYRLIDATLYVTFEPCVMCAGAMIHSRIG
RVVFGVRNAKTGAAGSLMDVLHYPGMNHRVEITEGILADECAALLCTFFR
MPRQVFNAQKKAQSSTD

[0577] In some embodiments, the TadA*8 is a truncated. In some embodiments, the truncated TadA*8 is missing 1, 2, 3, 4, 5, 6, 7, 8, 9, 10, 11, 12, 13, 14, 15, 6, 17, 18, 19, or 20 N-terminal amino acid residues relative to the full length TadA*8. In some embodiments, the truncated TadA*8 is missing 1, 2, 3, 4, 5, 6, 7, 8, 9, 10, 11, 12, 13, 14, 15, 6, 17, 18, 19, or 20 C-terminal amino acid residues relative to the full length TadA*8. In some embodiments the adenosine deaminase variant is a full-length TadA*8.

[0578] In some embodiments the TadA*8 is TadA*8.1, TadA*8.2, TadA*8.3, TadA*8.4, TadA*8.5, TadA*8.6, TadA*8.7, TadA*8.8, TadA*8.9, TadA*8.10, TadA*8.11, TadA*8.12, TadA*8.13, TadA*8.14, TadA*8.15, TadA*8.16, TadA*8.17, TadA*8.18, TadA*8.19, TadA*8.20, TadA*8.21, TadA*8.22, TadA*8.23, TadA*8.24.

[0579] In one embodiment, a fusion protein of the invention comprises a wild-type TadA is linked to an adenosine deaminase variant described herein (e.g., TadA*8), which is linked to Cas9 nickase. In particular embodiments, the fusion proteins comprise a single TadA*8 domain (e.g., provided as a monomer). In other embodiments, the base editor comprises TadA*8 and TadA(wt), which are capable of forming heterodimers. Exemplary sequences follow:

TadA(wt):
(SEQ ID NO: 2)
MSEVEFSHEYWMRHALTLAKRAWDEREVPVGAVLVHNNRVIGEGWNRPIG
RHDPTAHAEIMALRQGGLVMQNYRLIDATLYVTLEPCVMCAGAMIHSRIG
RVVFGARDAKTGAAGSLMDVLHHPGMNHRVEITEGILADECAALLSDFFR
MRRQEIKAQKKAQSSTD
TadA*7.10:
(SEQ ID NO: 20)
MSEVEFSHEYWMRHALTLAKRARDEREVPVGAVLVLNNRVIGEGWNRAIG
LHDPTAHAEIMALRQGGLVMQNYRLIDATLYVTFEPCVMCAGAMIHSRIG
RVVFGVRNAKTGAAGSLMDVLHYPGMNHRVEITEGILADECAALLCYFFR
MPRQVFNAQKKAQSSTD
Tad A*8:
(SEQ ID NO: 21)
MSEVEFSHEYWMRHALTLAKRARDEREVPVGAVLVLNNRVIGEGWNRAIG
LHDPTAHAEIMALRQGGLVMQNYRLIDATLYVTFEPCVMCAGAMIHSRIG
RVVFGVRNAKTGAAGSLMDVLHYPGMNHRVEITEGILADECAALLCTFFR
MPRQVFNAQKKAQSSTD.

[0580] In some embodiments, the adenosine deaminase comprises an amino acid sequence that is at least 60%, at least 65%, at least 70%, at least 75%, at least 80%, at least 85%, at least 90%, at least 95%, at least 96%, at least 97%, at least 98%, at least 99%, or at least 99.5% identical to any one of the amino acid sequences set forth in any of the adenosine deaminases provided herein. It should be appreciated that adenosine deaminases provided herein may include one or more mutations (e.g., any of the mutations provided herein). The disclosure provides any deaminase domains with a certain percent identity plus any of the mutations or combinations thereof described herein. In some embodiments, the adenosine deaminase comprises an amino acid sequence that has 1, 2, 3, 4, 5, 6, 7, 8, 9, 10, 11, 12, 13, 14, 15, 16, 17, 18, 19, 20, 21, 22, 21, 24, 25, 26, 27, 28, 29, 30, 31, 32, 33, 34, 35, 36, 37, 38, 39, 40, 41, 42, 43, 44, 45, 46, 47, 48, 49, 50, or more mutations compared to a reference sequence, or any of the adenosine deaminases provided herein. In some embodiments, the adenosine deaminase comprises an amino acid sequence that has at least 5, at least 10, at least 15, at least 20, at least 25, at least 30, at least 35, at least 40, at least 45, at least 50, at least 60, at least 70, at least 80, at least 90, at least 100, at least 110, at least 120, at least 130, at least 140, at least 150, at least 160, or at least 170 identical contiguous amino acid residues as compared to any one of the amino acid sequences known in the art or described herein.

[0581] In particular embodiments, a TadA*8 comprises one or more mutations at any of the following positions shown in bold. In other embodiments, a TadA*8 comprises one or more mutations at any of the positions shown with underlining:

| (SEQ ID NO: 20) | |
|---|---|
| MSEVEFSHEY WMRHALTLAK RARDEREVPV GAVLVLNNRV IGEGWNRAIG | 50 |
| LHDPTAHAEI MALRQGGLVM QNYRLIDATL YVTFEPCVMC AGAMIHSRIG | 100 |
| RVVFGVRNAK TGAAGSLMDV LHYPGMNHRV EITEGILADE CAALLCYFFR | 150 |
| MPRQVFNAQK KAQSSTD | |

[0582] For example, the TadA*8 comprises alterations at amino acid position 82 and/or 166 (e.g., V82S, T166R) alone or in combination with any one or more of the following Y147T, Y147R, Q154S, Y123H, and/or Q154R. In particular embodiments, a combination of alterations is selected from the group consisting of: Y147T+Q154R; Y147T+Q154S; Y147R+Q154S; V82S+Q154S; V82S+Y147R; V82S+Q154R; V82S+Y123H; I76Y+V82S; V82S+Y123H+Y147T; V82S+Y123H+Y147R; V82S+Y123H+Q154R; Y147R+Q154R+Y123H; Y147R+Q154R+I76Y; Y147R+Q154R+T166R; Y123H+Y147R+Q154R+I76Y; V82S+Y123H+Y147R+Q154R; and I76Y+V82S+Y123H+Y147R+Q154R.

[0583] In some embodiments, the adenosine deaminase is TadA*8, which comprises or consists essentially of the following sequence or a fragment thereof having adenosine deaminase activity:

(SEQ ID NO: 21)
MSEVEESHEY WMRHALTLAK RARDEREVPV GAVLVLNNRV
IGEGWNRAIG LHDPTAHAEI MALRQGGLVM QNYRLIDATL
YVTFEPCVMC AGAMIHSRIG RVVFGVRNAK TGAAGSLMDV
LHYPGMNHRV EITEGILADE CAALLCTFFR MPRQVFNAQK
KAQSSTD

[0584] In some embodiments, the TadA*8 is truncated. In some embodiments, the truncated TadA*8 is missing 1, 2, 3, 4, 5, 6, 7, 8, 9, 10, 11, 12, 13, 14, 15, 6, 17, 18, 19, or 20 N-terminal amino acid residues relative to the full length TadA*8. In some embodiments, the truncated TadA*8 is missing 1, 2, 3, 4, 5, 6, 7, 8, 9, 10, 11, 12, 13, 14, 15, 6, 17, 18, 19, or 20 C-terminal amino acid residues relative to the full length TadA*8. In some embodiments the adenosine deaminase variant is a full-length TadA*8.

[0585] In one embodiment, a fusion protein of the invention comprises a wild-type TadA is linked to an adenosine deaminase variant described herein (e.g., TadA*8), which is linked to Cas9 nickase. In particular embodiments, the fusion proteins comprise a single TadA*8 domain (e.g., provided as a monomer). In other embodiments, the base editor comprises TadA*8 and TadA(wt), which are capable of forming heterodimers.

[0586] In some embodiments, a synthetic library of adenosine deaminases alleles, e.g., TadA alleles can be utilized to generate an adenosine base editor with modified base editing efficiency and/or specificity. In some embodiments, an adenosine base editor generated from a synthetic library comprises higher base editing efficiency and/or specificity. In some embodiments, an adenosine base editor generated from a synthetic library exhibits increased base editing efficiency, increased base editing specificity, reduced off-target editing, reduced bystander editing, reduced indel formation, and/or reduced spurious editing compared to an adenosine base editor with a wild type TadA. In some embodiments, an adenosine base editor generated from a synthetic library exhibits increased base editing efficiency, increased base editing specificity, reduced off-target editing, reduced bystander editing, reduced indel formation, and/or reduced spurious editing compared to an adenosine base editor with a TadA*7.10. In some embodiments, the synthetic library comprises randomized TadA portion of ABE. In some embodiments, the synthetic library comprises all 20 canonical amino acid substitutions at each position of TadA. In some embodiments, the synthetic library comprises an average frequency of 1-2 nucleotide substitution mutations per library member. In some embodiments, the synthetic library comprises background mutations found in TadA*7.10.

[0587] In some embodiments, the base editing system described herein comprises an ABE with TadA inserted into a Cas9. Sequences of relevant ABEs with TadA inserted into a Cas9 are provided.

101 Cas9 TadAins 1015
(SEQ ID NO: 154)
MDKKYSIGLAIGTNSVGWAVITDEYKVPSKKFKVLGNTDRHSIKKNLIGA
LLFDSGETAEATRLKRTARRRYTRRKNRICYLQEIFSNEMAKVDDSFFHR
LEESFLVEEDKKHERHPIFGNIVDEVAYHEKYPTIYHLRKKLVDSTDKAD
LRLIYLALAHMIKFRGHFLIEGDLNPDNSDVDKLFIQLVQTYNQLFEENP
INASGVDAKAILSARLSKSRRLENLIAQLPGEKKNGLFGNLIALSLGLTP
NFKSNFDLAEDAKLQLSKDTYDDDLDNLLAQIGDQYADLFLAAKNLSDAI
LLSDILRVNTEITKAPLSASMIKRYDEHHQDLTLLKALVRQQLPEKYKEI
FFDQSKNGYAGYIDGGASQEEFYKFIKPILEKMDGTEELLVKLNREDLLR
KQRTFDNGSIPHQIHLGELHAILRRQEDFYPFLKDNREKIEKILTFRIPY
YVGPLARGNSRFAWMTRKSEETITPWNFEEVVDKGASAQSFIERMTNFDK
NLPNEKVLPKHSLLYEYFTVYNELTKVKYVTEGMRKPAFLSGEQKKAIVD
LLFKTNRKVTVKQLKEDYFKKIECFDSVEISGVEDRFNASLGTYHDLLKI
IKDKDFLDNEENEDILEDIVLTLTLFEDREMIEERLKTYAHLFDDKVMKQ
LKRRRYTGWGRLSRKLINGIRDKQSGKTILDFLKSDGFANRNFMQLIHDD
SLTFKEDIQKAQVSGQGDSLHEHIANLAGSPAIKKGILQTVKVVDELVKV
MGRHKPENIVIEMARENQTTQKGQKNSRERMKRIEEGIKELGSQILKEHP
VENTQLQNEKLYLYYLQNGRDMYVDQELDINRLSDYDVDHIVPQSFLKDD
SIDNKVLTRSDKNRGKSDNVPSEEVVKKMKNYWRQLLNAKLITQRKFDNL
TKAERGGLSELDKAGFIKRQLVETRQITKHVAQILDSRMNTKYDENDKLI
REVKVITLKSKLVSDFRKDFQFYKVREINNYHHAHDAYLNAVVGTALIKK
YPKLESEFVYGDYKVGSSGSETPGTSESATPESSGSEVEFSHEYWMRHAL
TLAKRARDEREVPVGAVLVLNNRVIGEGWNRAIGLHDPTAHAEIMALRQG
GLVMQNYRLIDATLYVTFEPCVMCAGAMIHSRIGRVVFGVRNAKTGAAGS
LMDVLHYPGMNHRVEITEGILADECAALLCYFFRMPRQVFNAQKKAQSST
DYDVRKMIAKSEQEIGKATAKYFFYSNIMNFFKTEITLANGEIRKRPLIE
TNGETGEIVWDKGRDFATVRKVLSMPQVNIVKKTEVQTGGFSKESILPKR
NSDKLIARKKDWDPKKYGGFDSPTVAYSVLVVAKVEKGKSKKLKSVKELL
GITIMERSSFEKNPIDFLEAKGYKEVKKDLIIKLPKYSLFELENGRKRML
ASAGELQKGNELALPSKYVNFLYLASHYEKLKGSPEDNEQKQLFVEQHKH
YLDEIIEQISEFSKRVILADANLDKVLSAYNKHRDKPIREQAENIIHLFT
LTNLGAPAAFKYFDTTIDRKRYTSTKEVLDATLIHQSITGLYETRIDLSQ
LGGD
102 Cas9 TadAins 1022
(SEQ ID NO: 155)
MDKKYSIGLAIGTNSVGWAVITDEYKVPSKKFKVLGNTDRHSIKKNLIGA
LLFDSGETAEATRLKRTARRRYTRRKNRICYLQEIFSNEMAKVDDSFFHR
LEESFLVEEDKKHERHPIFGNIVDEVAYHEKYPTIYHLRKKLVDSTDKAD
LRLIYLALAHMIKFRGHFLIEGDLNPDNSDVDKLFIQLVQTYNQLFEENP
INASGVDAKAILSARLSKSRRLENLIAQLPGEKKNGLFGNLIALSLGLTP
NFKSNFDLAEDAKLQLSKDTYDDDLDNLLAQIGDQYADLFLAAKNLSDAI
LLSDILRVNTEITKAPLSASMIKRYDEHHQDLTLLKALVRQQLPEKYKEI
FFDQSKNGYAGYIDGGASQEEFYKFIKPILEKMDGTEELLVKLNREDLLR
KQRTFDNGSIPHQIHLGELHAILRRQEDFYPFLKDNREKIEKILTFRIPY
YVGPLARGNSRFAWMTRKSEETITPWNFEEVVDKGASAQSFIERMTNFDK
NLPNEKVLPKHSLLYEYFTVYNELTKVKYVTEGMRKPAFLSGEQKKAIVD
LLFKTNRKVTVKQLKEDYFKKIECFDSVEISGVEDRFNASLGTYHDLLKI
IKDKDFLDNEENEDILEDIVLTLTLFEDREMIEERLKTYAHLFDDKVMKQ
LKRRRYTGWGRLSRKLINGIRDKQSGKTILDFLKSDGFANRNFMQLIHDD
SLTFKEDIQKAQVSGQGDSLHEHIANLAGSPAIKKGILQTVKVVDELVKV
MGRHKPENIVIEMARENQTTQKGQKNSRERMKRIEEGIKELGSQILKEHP
VENTQLQNEKLYLYYLQNGRDMYVDQELDINRLSDYDVDHIVPQSFLKDD
SIDNKVLTRSDKNRGKSDNVPSEEVVKKMKNYWRQLLNAKLITQRKFDNL
TKAERGGLSELDKAGFIKRQLVETRQITKHVAQILDSRMNTKYDENDKLI
REVKVITLKSKLVSDFRKDFQFYKVREINNYHHAHDAYLNAVVGTALIKK
YPKLESEFVYGDYKVYDVRKMIGSSGSETPGTSESATPESSGSEVEFSHE
YWMRHALTLAKRARDEREVPVGAVLVLNNRVIGEGWNRAIGLHDPTAHAE
IMALRQGGLVMQNYRLIDATLYVTFEPCVMCAGAMIHSRIGRVVFGVRNA
KTGAAGSLMDVLHYPGMNHRVEITEGILADECAALLCYFFRMPRQVFNAQ
KKAQSSTDAKSEQEIGKATAKYFFYSNIMNFFKTEITLANGEIRKRPLIE
TNGETGEIVWDKGRDFATVRKVLSMPQVNIVKKTEVQTGGFSKESILPKR
NSDKLIARKKDWDPKKYGGFDSPTVAYSVLVVAKVEKGKSKKLKSVKELL
GITIMERSSFEKNPIDFLEAKGYKEVKKDLIIKLPKYSLFELENGRKRML
ASAGELQKGNELALPSKYVNFLYLASHYEKLKGSPEDNEQKQLFVEQHKH
YLDEIIEQISEFSKRVILADANLDKVLSAYNKHRDKPIREQAENIIHLFT
LTNLGAPAAFKYFDTTIDRKRYTSTKEVLDATLIHQSITGLYETRIDLSQ
LGGD
103 Cas9 TadAins 1029
(SEQ ID NO: 156)
MDKKYSIGLAIGTNSVGWAVITDEYKVPSKKFKVLGNTDRHSIKKNLIGA
LLFDSGETAEATRLKRTARRRYTRRKNRICYLQEIFSNEMAKVDDSFFHR
LEESFLVEEDKKHERHPIFGNIVDEVAYHEKYPTIYHLRKKLVDSTDKAD
LRLIYLALAHMIKFRGHFLIEGDLNPDNSDVDKLFIQLVQTYNQLFEENP
INASGVDAKAILSARLSKSRRLENLIAQLPGEKKNGLFGNLIALSLGLTP
NFKSNFDLAEDAKLQLSKDTYDDDLDNLLAQIGDQYADLFLAAKNLSDAI
LLSDILRVNTEITKAPLSASMIKRYDEHHQDLTLLKALVRQQLPEKYKEI
FFDQSKNGYAGYIDGGASQEEFYKFIKPILEKMDGTEELLVKLNREDLLR
KQRTFDNGSIPHQIHLGELHAILRRQEDFYPFLKDNREKIEKILTFRIPY
YVGPLARGNSRFAWMTRKSEETITPWNFEEVVDKGASAQSFIERMTNFDK
NLPNEKVLPKHSLLYEYFTVYNELTKVKYVTEGMRKPAFLSGEQKKAIVD
LLFKTNRKVTVKQLKEDYFKKIECFDSVEISGVEDRFNASLGTYHDLLKI
IKDKDFLDNEENEDILEDIVLTLTLFEDREMIEERLKTYAHLFDDKVMKQ
LKRRRYTGWGRLSRKLINGIRDKQSGKTILDFLKSDGFANRNFMQLIHDD
SLTFKEDIQKAQVSGQGDSLHEHIANLAGSPAIKKGILQTVKVVDELVKV
MGRHKPENIVIEMARENQTTQKGQKNSRERMKRIEEGIKELGSQILKEHP
VENTQLQNEKLYLYYLQNGRDMYVDQELDINRLSDYDVDHIVPQSFLKDD
SIDNKVLTRSDKNRGKSDNVPSEEVVKKMKNYWRQLLNAKLITQRKFDNL
TKAERGGLSELDKAGFIKRQLVETRQITKHVAQILDSRMNTKYDENDKLI
REVKVITLKSKLVSDFRKDFQFYKVREINNYHHAHDAYLNAVVGTALIKK
YPKLESEFVYGDYKVYDVRKMIAKSEQEIGSSGSETPGTSESATPESSGS
EVEFSHEYWMRHALTLAKRARDEREVPVGAVLVLNNRVIGEGWNRAIGLH
DPTAHAEIMALRQGGLVMQNYRLIDATLYVTFEPCVMCAGAMIHSRIGRV
VFGVRNAKTGAAGSLMDVLHYPGMNHRVEITEGILADECAALLCYFFRMP
RQVFNAQKKAQSSTDGKATAKYFFYSNIMNFFKTEITLANGEIRKRPLIE
TNGETGEIVWDKGRDFATVRKVLSMPQVNIVKKTEVQTGGFSKESILPKR
NSDKLIARKKDWDPKKYGGFDSPTVAYSVLVVAKVEKGKSKKLKSVKELL
GITIMERSSFEKNPIDFLEAKGYKEVKKDLIIKLPKYSLFELENGRKRML
ASAGELQKGNELALPSKYVNFLYLASHYEKLKGSPEDNEQKQLFVEQHKH
YLDEIIEQISEFSKRVILADANLDKVLSAYNKHRDKPIREQAENIIHLFT
LTNLGAPAAFKYFDTTIDRKRYTSTKEVLDATLIHQSITGLYETRIDLSQ
LGGD
103 Cas9 TadAins 1040
(SEQ ID NO: 157)
MDKKYSIGLAIGTNSVGWAVITDEYKVPSKKFKVLGNTDRHSIKKNLIGA
LLFDSGETAEATRLKRTARRRYTRRKNRICYLQEIFSNEMAKVDDSFFHR
LEESFLVEEDKKHERHPIFGNIVDEVAYHEKYPTIYHLRKKLVDSTDKAD
LRLIYLALAHMIKFRGHFLIEGDLNPDNSDVDKLFIQLVQTYNQLFEENP
INASGVDAKAILSARLSKSRRLENLIAQLPGEKKNGLFGNLIALSLGLTP
NFKSNFDLAEDAKLQLSKDTYDDDLDNLLAQIGDQYADLFLAAKNLSDAI
LLSDILRVNTEITKAPLSASMIKRYDEHHQDLTLLKALVRQQLPEKYKEI
FFDQSKNGYAGYIDGGASQEEFYKFIKPILEKMDGTEELLVKLNREDLLR
KQRTFDNGSIPHQIHLGELHAILRRQEDFYPFLKDNREKIEKILTFRIPY
YVGPLARGNSRFAWMTRKSEETITPWNFEEVVDKGASAQSFIERMTNFDK
NLPNEKVLPKHSLLYEYFTVYNELTKVKYVTEGMRKPAFLSGEQKKAIVD
LLFKTNRKVTVKQLKEDYFKKIECFDSVEISGVEDRFNASLGTYHDLLKI
IKDKDFLDNEENEDILEDIVLTLTLFEDREMIEERLKTYAHLFDDKVMKQ
LKRRRYTGWGRLSRKLINGIRDKQSGKTILDFLKSDGFANRNFMQLIHDD
SLTFKEDIQKAQVSGQGDSLHEHIANLAGSPAIKKGILQTVKVVDELVKV
MGRHKPENIVIEMARENQTTQKGQKNSRERMKRIEEGIKELGSQILKEHP
VENTQLQNEKLYLYYLQNGRDMYVDQELDINRLSDYDVDHIVPQSFLKDD
SIDNKVLTRSDKNRGKSDNVPSEEVVKKMKNYWRQLLNAKLITQRKFDNL
TKAERGGLSELDKAGFIKRQLVETRQITKHVAQILDSRMNTKYDENDKLI
REVKVITLKSKLVSDFRKDFQFYKVREINNYHHAHDAYLNAVVGTALIKK
YPKLESEFVYGDYKVYDVRKMIAKSEQEIGKATAKYFFYSGSSGSETPGT
SESATPESSGSEVEFSHEYWMRHALTLAKRARDEREVPVGAVLVLNNRVI
GEGWNRAIGLHDPTAHAEIMALRQGGLVMQNYRLIDATLYVTFEPCVMCA
GAMIHSRIGRVVFGVRNAKTGAAGSLMDVLHYPGMNHRVEITEGILADEC
AALLCYFFRMPRQVFNAQKKAQSSTDNIMNFFKTEITLANGEIRKRPLIE
TNGETGEIVWDKGRDFATVRKVLSMPQVNIVKKTEVQTGGFSKESILPKR
NSDKLIARKKDWDPKKYGGFDSPTVAYSVLVVAKVEKGKSKKLKSVKELL
GITIMERSSFEKNPIDFLEAKGYKEVKKDLIIKLPKYSLFELENGRKRML
ASAGELQKGNELALPSKYVNFLYLASHYEKLKGSPEDNEQKQLFVEQHKH
YLDEIIEQISEFSKRVILADANLDKVLSAYNKHRDKPIREQAENIIHLFT
LTNLGAPAAFKYFDTTIDRKRYTSTKEVLDATLIHQSITGLYETRIDLSQ
LGGD
105 Cas9 TadAins 1068
(SEQ ID NO: 158)
MDKKYSIGLAIGTNSVGWAVITDEYKVPSKKFKVLGNTDRHSIKKNLIGA
LLFDSGETAEATRLKRTARRRYTRRKNRICYLQEIFSNEMAKVDDSFFHR
LEESFLVEEDKKHERHPIFGNIVDEVAYHEKYPTIYHLRKKLVDSTDKAD
LRLIYLALAHMIKFRGHFLIEGDLNPDNSDVDKLFIQLVQTYNQLFEENP
INASGVDAKAILSARLSKSRRLENLIAQLPGEKKNGLFGNLIALSLGLTP
NFKSNFDLAEDAKLQLSKDTYDDDLDNLLAQIGDQYADLFLAAKNLSDAI
LLSDILRVNTEITKAPLSASMIKRYDEHHQDLTLLKALVRQQLPEKYKEI
FFDQSKNGYAGYIDGGASQEEFYKFIKPILEKMDGTEELLVKLNREDLLR
KQRTFDNGSIPHQIHLGELHAILRRQEDFYPFLKDNREKIEKILTFRIPY
YVGPLARGNSRFAWMTRKSEETITPWNFEEVVDKGASAQSFIERMTNFDK
NLPNEKVLPKHSLLYEYFTVYNELTKVKYVTEGMRKPAFLSGEQKKAIVD
LLFKTNRKVTVKQLKEDYFKKIECFDSVEISGVEDRFNASLGTYHDLLKI
IKDKDFLDNEENEDILEDIVLTLTLFEDREMIEERLKTYAHLFDDKVMKQ
LKRRRYTGWGRLSRKLINGIRDKQSGKTILDFLKSDGFANRNFMQLIHDD
SLTFKEDIQKAQVSGQGDSLHEHIANLAGSPAIKKGILQTVKVVDELVKV
MGRHKPENIVIEMARENQTTQKGQKNSRERMKRIEEGIKELGSQILKEHP
VENTQLQNEKLYLYYLQNGRDMYVDQELDINRLSDYDVDHIVPQSFLKDD
SIDNKVLTRSDKNRGKSDNVPSEEVVKKMKNYWRQLLNAKLITQRKFDNL
TKAERGGLSELDKAGFIKRQLVETRQITKHVAQILDSRMNTKYDENDKLI
REVKVITLKSKLVSDFRKDFQFYKVREINNYHHAHDAYLNAVVGTALIKK
YPKLESEFVYGDYKVYDVRKMIAKSEQEIGKATAKYFFYSNIMNFFKTEI
TLANGEIRKRPLIETNGEGSSGSETPGTSESATPESSGSEVEFSHEYWMR
HALTLAKRARDEREVPVGAVLVLNNRVIGEGWNRAIGLHDPTAHAEIMAL
RQGGLVMQNYRLIDATLYVTFEPCVMCAGAMIHSRIGRVVFGVRNAKTGA
AGSLMDVLHYPGMNHRVEITEGILADECAALLCYFFRMPRQVFNAQKKAQ
SSTDTGEIVWDKGRDFATVRKVLSMPQVNIVKKTEVQTGGFSKESILPKR
NSDKLIARKKDWDPKKYGGFDSPTVAYSVLVVAKVEKGKSKKLKSVKELL
GITIMERSSFEKNPIDFLEAKGYKEVKKDLIIKLPKYSLFELENGRKRML
ASAGELQKGNELALPSKYVNFLYLASHYEKLKGSPEDNEQKQLFVEQHKH
YLDEIIEQISEFSKRVILADANLDKVLSAYNKHRDKPIREQAENIIHLFT
LTNLGAPAAFKYFDTTIDRKRYTSTKEVLDATLIHQSITGLYETRIDLSQ
LGGD
106 Cas9 TadAins 1247
(SEQ ID NO: 159)
MDKKYSIGLAIGTNSVGWAVITDEYKVPSKKFKVLGNTDRHSIKKNLIGA
LLFDSGETAEATRLKRTARRRYTRRKNRICYLQEIFSNEMAKVDDSFFHR
LEESFLVEEDKKHERHPIFGNIVDEVAYHEKYPTIYHLRKKLVDSTDKAD
LRLIYLALAHMIKFRGHFLIEGDLNPDNSDVDKLFIQLVQTYNQLFEENP
INASGVDAKAILSARLSKSRRLENLIAQLPGEKKNGLFGNLIALSLGLTP
NFKSNFDLAEDAKLQLSKDTYDDDLDNLLAQIGDQYADLFLAAKNLSDAI
LLSDILRVNTEITKAPLSASMIKRYDEHHQDLTLLKALVRQQLPEKYKEI
FFDQSKNGYAGYIDGGASQEEFYKFIKPILEKMDGTEELLVKLNREDLLR
KQRTFDNGSIPHQIHLGELHAILRRQEDFYPFLKDNREKIEKILTFRIPY
YVGPLARGNSRFAWMTRKSEETITPWNFEEVVDKGASAQSFIERMTNFDK
NLPNEKVLPKHSLLYEYFTVYNELTKVKYVTEGMRKPAFLSGEQKKAIVD
LLFKTNRKVTVKQLKEDYFKKIECFDSVEISGVEDRFNASLGTYHDLLKI
IKDKDFLDNEENEDILEDIVLTLTLFEDREMIEERLKTYAHLFDDKVMKQ
LKRRRYTGWGRLSRKLINGIRDKQSGKTILDFLKSDGFANRNFMQLIHDD
SLTFKEDIQKAQVSGQGDSLHEHIANLAGSPAIKKGILQTVKVVDELVKV
MGRHKPENIVIEMARENQTTQKGQKNSRERMKRIEEGIKELGSQILKEHP
VENTQLQNEKLYLYYLQNGRDMYVDQELDINRLSDYDVDHIVPQSFLKDD
SIDNKVLTRSDKNRGKSDNVPSEEVVKKMKNYWRQLLNAKLITQRKFDNL
TKAERGGLSELDKAGFIKRQLVETRQITKHVAQILDSRMNTKYDENDKLI
REVKVITLKSKLVSDFRKDFQFYKVREINNYHHAHDAYLNAVVGTALIKK
YPKLESEFVYGDYKVYDVRKMIAKSEQEIGKATAKYFFYSNIMNFFKTEI
TLANGEIRKRPLIETNGETGEIVWDKGRDFATVRKVLSMPQVNIVKKTEV
QTGGFSKESILPKRNSDKLIARKKDWDPKKYGGFDSPTVAYSVLVVAKVE
KGKSKKLKSVKELLGITIMERSSFEKNPIDFLEAKGYKEVKKDLIIKLPK
YSLFELENGRKRMLASAGELQKGNELALPSKYVNFLYLASHYEKLKGGSS
GSETPGTSESATPESSGSEVEFSHEYWMRHALTLAKRARDEREVPVGAVL
VLNNRVIGEGWNRAIGLHDPTAHAEIMALRQGGLVMQNYRLIDATLYVTF
EPCVMCAGAMIHSRIGRVVFGVRNARTGAAGSLMDVLHYPGMNHRVEITE
GILADECAALLCYFFRMPRQVFNAQKKAQSSTDSPEDNEQKQLFVEQHKH
YLDEIIEQISEFSKRVILADANLDKVLSAYNKHRDKPIREQAENIIHLFT
LTNLGAPAAFKYFDTTIDRKRYTSTKEVLDATLIHQSITGLYETRIDLSQ
LGGD
107 Cas9 TadAins 1054
(SEQ ID NO: 160)
MDKKYSIGLAIGTNSVGWAVITDEYKVPSKKFKVLGNTDRHSIKKNLIGA
LLFDSGETAEATRLKRTARRRYTRRKNRICYLQEIFSNEMAKVDDSFFHR
LEESFLVEEDKKHERHPIFGNIVDEVAYHEKYPTIYHLRKKLVDSTDKAD
LRLIYLALAHMIKFRGHFLIEGDLNPDNSDVDKLFIQLVQTYNQLFEENP
INASGVDAKAILSARLSKSRRLENLIAQLPGEKKNGLFGNLIALSLGLTP
NFKSNFDLAEDAKLQLSKDTYDDDLDNLLAQIGDQYADLFLAAKNLSDAI
LLSDILRVNTEITKAPLSASMIKRYDEHHQDLTLLKALVRQQLPEKYKEI
FFDQSKNGYAGYIDGGASQEEFYKFIKPILEKMDGTEELLVKLNREDLLR
KQRTFDNGSIPHQIHLGELHAILRRQEDFYPFLKDNREKIEKILTFRIPY
YVGPLARGNSRFAWMTRKSEETITPWNFEEVVDKGASAQSFIERMTNFDK
NLPNEKVLPKHSLLYEYFTVYNELTKVKYVTEGMRKPAFLSGEQKKAIVD
LLFKTNRKVTVKQLKEDYFKKIECFDSVEISGVEDRFNASLGTYHDLLKI
IKDKDFLDNEENEDILEDIVLTLTLFEDREMIEERLKTYAHLFDDKVMKQ
LKRRRYTGWGRLSRKLINGIRDKQSGKTILDFLKSDGFANRNFMQLIHDD
SLTFKEDIQKAQVSGQGDSLHEHIANLAGSPAIKKGILQTVKVVDELVKV
MGRHKPENIVIEMARENQTTQKGQKNSRERMKRIEEGIKELGSQILKEHP
VENTQLQNEKLYLYYLQNGRDMYVDQELDINRLSDYDVDHIVPQSFLKDD
SIDNKVLTRSDKNRGKSDNVPSEEVVKKMKNYWRQLLNAKLITQRKFDNL
TKAERGGLSELDKAGFIKRQLVETRQITKHVAQILDSRMNTKYDENDKLI
REVKVITLKSKLVSDFRKDFQFYKVREINNYHHAHDAYLNAVVGTALIKK
YPKLESEFVYGDYKVYDVRKMIAKSEQEIGKATAKYFFYSNIMNFFKTEI
TLANGSSGSETPGTSESATPESSGSEVEFSHEYWMRHALTLAKRARDERE
VPVGAVLVLNNRVIGEGWNRAIGLHDPTAHAEIMALRQGGLVMQNYRLID
ATLYVTFEPCVMCAGAMIHSRIGRVVFGVRNAKTGAAGSLMDVLHYPGMN
HRVEITEGILADECAALLCYFFRMPRQVFNAQKKAQSSTDGEIRKRPLIE
TNGETGEIVWDKGRDFATVRKVLSMPQVNIVKKTEVQTGGFSKESILPKR
NSDKLIARKKDWDPKKYGGFDSPTVAYSVLVVAKVEKGKSKKLKSVKELL
GITIMERSSFEKNPIDFLEAKGYKEVKKDLIIKLPKYSLFELENGRKRML
ASAGELQKGNELALPSKYVNFLYLASHYEKLKGSPEDNEQKQLFVEQHKH
YLDEIIEQISEFSKRVILADANLDKVLSAYNKHRDKPIREQAENIIHLFT
LTNLGAPAAFKYFDTTIDRKRYTSTKEVLDATLIHQSITGLYETRIDLSQ
LGGD
108 Cas9 TadAins 1026
(SEQ ID NO: 161)
MDKKYSIGLAIGTNSVGWAVITDEYKVPSKKFKVLGNTDRHSIKKNLIGA
LLFDSGETAEATRLKRTARRRYTRRKNRICYLQEIFSNEMAKVDDSFFHR
LEESFLVEEDKKHERHPIFGNIVDEVAYHEKYPTIYHLRKKLVDSTDKAD
LRLIYLALAHMIKFRGHFLIEGDLNPDNSDVDKLFIQLVQTYNQLFEENP
INASGVDAKAILSARLSKSRRLENLIAQLPGEKKNGLFGNLIALSLGLTP
NFKSNFDLAEDAKLQLSKDTYDDDLDNLLAQIGDQYADLFLAAKNLSDAI
LLSDILRVNTEITKAPLSASMIKRYDEHHQDLTLLKALVRQQLPEKYKEI
FFDQSKNGYAGYIDGGASQEEFYKFIKPILEKMDGTEELLVKLNREDLLR
KQRTFDNGSIPHQIHLGELHAILRRQEDFYPFLKDNREKIEKILTFRIPY
YVGPLARGNSRFAWMTRKSEETITPWNFEEVVDKGASAQSFIERMTNFDK
NLPNEKVLPKHSLLYEYFTVYNELTKVKYVTEGMRKPAFLSGEQKKAIVD
LLFKTNRKVTVKQLKEDYFKKIECFDSVEISGVEDRFNASLGTYHDLLKI
IKDKDFLDNEENEDILEDIVLTLTLFEDREMIEERLKTYAHLFDDKVMKQ
LKRRRYTGWGRLSRKLINGIRDKQSGKTILDFLKSDGFANRNFMQLIHDD
SLTFKEDIQKAQVSGQGDSLHEHIANLAGSPAIKKGILQTVKVVDELVKV
MGRHKPENIVIEMARENQTTQKGQKNSRERMKRIEEGIKELGSQILKEHP
VENTQLQNEKLYLYYLQNGRDMYVDQELDINRLSDYDVDHIVPQSFLKDD
SIDNKVLTRSDKNRGKSDNVPSEEVVKKMKNYWRQLLNAKLITQRKFDNL
TKAERGGLSELDKAGFIKRQLVETRQITKHVAQILDSRMNTKYDENDKLI
REVKVITLKSKLVSDFRKDFQFYKVREINNYHHAHDAYLNAVVGTALIKK
YPKLESEFVYGDYKVYDVRKMIAKSEGSSGSETPGTSESATPESSGSEVE
FSHEYWMRHALTLAKRARDEREVPVGAVLVLNNRVIGEGWNRAIGLHDPT
AHAEIMALRQGGLVMQNYRLIDATLYVTFEPCVMCAGAMIHSRIGRVVFG
VRNAKTGAAGSLMDVLHYPGMNHRVEITEGILADECAALLCYFFRMPRQV
FNAQKKAQSSTDQEIGKATAKYFFYSNIMNFFKTEITLANGEIRKRPLIE
TNGETGEIVWDKGRDFATVRKVLSMPQVNIVKKTEVQTGGFSKESILPKR
NSDKLIARKKDWDPKKYGGFDSPTVAYSVLVVAKVEKGKSKKLKSVKELL
GITIMERSSFEKNPIDFLEAKGYKEVKKDLIIKLPKYSLFELENGRKRML
ASAGELQKGNELALPSKYVNFLYLASHYEKLKGSPEDNEQKQLFVEQHKH
YLDEIIEQISEFSKRVILADANLDKVLSAYNKHRDKPIREQAENIIHLFT
LTNLGAPAAFKYFDTTIDRKRYTSTKEVLDATLIHQSITGLYETRIDLSQ
LGGD
109 Cas9 TadAins 768
(SEQ ID NO: 162)
MDKKYSIGLAIGTNSVGWAVITDEYKVPSKKFKVLGNTDRHSIKKNLIGA
LLFDSGETAEATRLKRTARRRYTRRKNRICYLQEIFSNEMAKVDDSFFHR
LEESFLVEEDKKHERHPIFGNIVDEVAYHEKYPTIYHLRKKLVDSTDKAD
LRLIYLALAHMIKFRGHFLIEGDLNPDNSDVDKLFIQLVQTYNQLFEENP
INASGVDAKAILSARLSKSRRLENLIAQLPGEKKNGLFGNLIALSLGLTP
NFKSNFDLAEDAKLQLSKDTYDDDLDNLLAQIGDQYADLFLAAKNLSDAI
LLSDILRVNTEITKAPLSASMIKRYDEHHQDLTLLKALVRQQLPEKYKEI
FFDQSKNGYAGYIDGGASQEEFYKFIKPILEKMDGTEELLVKLNREDLLR
KQRTFDNGSIPHQIHLGELHAILRRQEDFYPFLKDNREKIEKILTFRIPY
YVGPLARGNSRFAWMTRKSEETITPWNFEEVVDKGASAQSFIERMTNFDK
NLPNEKVLPKHSLLYEYFTVYNELTKVKYVTEGMRKPAFLSGEQKKAIVD
LLFKTNRKVTVKQLKEDYFKKIECFDSVEISGVEDRFNASLGTYHDLLKI
IKDKDFLDNEENEDILEDIVLTLTLFEDREMIEERLKTYAHLFDDKVMKQ
LKRRRYTGWGRLSRKLINGIRDKQSGKTILDFLKSDGFANRNFMQLIHDD
SLTFKEDIQKAQVSGQGDSLHEHIANLAGSPAIKKGILQTVKVVDELVKV
MGRHKPENIVIEMARENQGSSGSETPGTSESATPESSGSEVEFSHEYWMR
HALTLAKRARDEREVPVGAVLVLNNRVIGEGWNRAIGLHDPTAHAEIMAL
RQGGLVMQNYRLIDATLYVTFEPCVMCAGAMIHSRIGRVVFGVRNAKTGA
AGSLMDVLHYPGMNHRVEITEGILADECAALLCYFFRMPRTTQKGQKNSR
ERMKRIEEGIKELGSQILKEHPVENTQLQNEKLYLYYLQNGRDMYVDQEL
DINRLSDYDVDHIVPQSFLKDDSIDNKVLTRSDKNRGKSDNVPSEEVVKK
MKNYWRQLLNAKLITQRKFDNLTKAERGGLSELDKAGFIKRQLVETRQIT
KHVAQILDSRMNTKYDENDKLIREVKVITLKSKLVSDFRKDFQFYKVREI
NNYHHAHDAYLNAVVGTALIKKYPKLESEFVYGDYKVYDVRKMIAKSEQE
IGKATAKYFFYSNIMNFFKTEITLANGEIRKRPLIETNGETGEIVWDKGR
DFATVRKVLSMPQVNIVKKTEVQTGGFSKESILPKRNSDKLIARKKDWDP
KKYGGFDSPTVAYSVLVVAKVEKGKSKKLKSVKELLGITIMERSSFEKNP
IDFLEAKGYKEVKKDLIIKLPKYSLFELENGRKRMLASAGELQKGNELAL
PSKYVNFLYLASHYEKLKGSPEDNEQKQLFVEQHKHYLDEIIEQISEFSK
RVILADANLDKVLSAYNKHRDKPIREQAENIIHLFTLTNLGAPAAFKYFD
TTIDRKRYTSTKEVLDATLIHQSITGLYETRIDLSQLGGD
110.1 Cas9 TadAins 1250
(SEQ ID NO: 163)
MDKKYSIGLAIGTNSVGWAVITDEYKVPSKKFKVLGNTDRHSIKKNLIGA
LLFDSGETAEATRLKRTARRRYTRRKNRICYLQEIFSNEMAKVDDSFFHR
LEESFLVEEDKKHERHPIFGNIVDEVAYHEKYPTIYHLRKKLVDSTDKAD
LRLIYLALAHMIKFRGHFLIEGDLNPDNSDVDKLFIQLVQTYNQLFEENP
INASGVDAKAILSARLSKSRRLENLIAQLPGEKKNGLFGNLIALSLGLTP
NFKSNFDLAEDAKLQLSKDTYDDDLDNLLAQIGDQYADLFLAAKNLSDAI
LLSDILRVNTEITKAPLSASMIKRYDEHHQDLTLLKALVRQQLPEKYKEI
FFDQSKNGYAGYIDGGASQEEFYKFIKPILEKMDGTEELLVKLNREDLLR
KQRTFDNGSIPHQIHLGELHAILRRQEDFYPFLKDNREKIEKILTFRIPY
YVGPLARGNSRFAWMTRKSEETITPWNFEEVVDKGASAQSFIERMTNFDK
NLPNEKVLPKHSLLYEYFTVYNELTKVKYVTEGMRKPAFLSGEQKKAIVD
LLFKTNRKVTVKQLKEDYFKKIECFDSVEISGVEDRFNASLGTYHDLLKI
IKDKDFLDNEENEDILEDIVLTLTLFEDREMIEERLKTYAHLFDDKVMKQ
LKRRRYTGWGRLSRKLINGIRDKQSGKTILDFLKSDGFANRNFMQLIHDD
SLTFKEDIQKAQVSGQGDSLHEHIANLAGSPAIKKGILQTVKVVDELVKV
MGRHKPENIVIEMARENQTTQKGQKNSRERMKRIEEGIKELGSQILKEHP
VENTQLQNEKLYLYYLQNGRDMYVDQELDINRLSDYDVDHIVPQSFLKDD
SIDNKVLTRSDKNRGKSDNVPSEEVVKKMKNYWRQLLNAKLITQRKEDNL
TKAERGGLSELDKAGFIKRQLVETRQITKHVAQILDSRMNTKYDENDKLI
REVKVITLKSKLVSDFRKDFQFYKVREINNYHHAHDAYLNAVVGTALIKK
YPKLESEFVYGDYKVYDVRKMIAKSEQEIGKATAKYFFYSNIMNFFKTEI
TLANGEIRKRPLIETNGETGEIVWDKGRDFATVRKVLSMPQVNIVKKTEV
QTGGFSKESILPKRNSDKLIARKKDWDPKKYGGFDSPTVAYSVLVVAKVE
KGKSKKLKSVKELLGITIMERSSFEKNPIDFLEAKGYKEVKKDLIIKLPK
YSLFELENGRKRMLASAGELQKGNELALPSKYVNFLYLASHYEKLKGSPG
SSGSETPGTSESATPESSGSEVEFSHEYWMRHALTLAKRARDEREVPVGA
VLVLNNRVIGEGWNRAIGLHDPTAHAEIMALRQGGLVMQNYRLIDATLYV
TFEPCVMCAGAMIHSRIGRVVFGVRNAKTGAAGSLMDVLHYPGMNHRVEI
TEGILADECAALLCYFFRMPREDNEQKQLFVEQHKHYLDEIIEQISEFSK
RVILADANLDKVLSAYNKHRDKPIREQAENIIHLFTLTNLGAPAAFKYFD
TTIDRKRYTSTKEVLDATLIHQSITGLYETRIDLSQLGGD
110.2 Cas9 TadAins 1250
(SEQ ID NO: 164)
MDKKYSIGLAIGTNSVGWAVITDEYKVPSKKFKVLGNTDRHSIKKNLIGA
LLFDSGETAEATRLKRTARRRYTRRKNRICYLQEIFSNEMAKVDDSFFHR
LEESFLVEEDKKHERHPIFGNIVDEVAYHEKYPTIYHLRKKLVDSTDKAD
LRLIYLALAHMIKFRGHFLIEGDLNPDNSDVDKLFIQLVQTYNQLFEENP
INASGVDAKAILSARLSKSRRLENLIAQLPGEKKNGLFGNLIALSLGLTP
NFKSNFDLAEDAKLQLSKDTYDDDLDNLLAQIGDQYADLFLAAKNLSDAI
LLSDILRVNTEITKAPLSASMIKRYDEHHQDLTLLKALVRQQLPEKYKEI
FFDQSKNGYAGYIDGGASQEEFYKFIKPILEKMDGTEELLVKLNREDLLR
KQRTFDNGSIPHQIHLGELHAILRRQEDFYPFLKDNREKIEKILTFRIPY
YVGPLARGNSRFAWMTRKSEETITPWNFEEVVDKGASAQSFIERMTNFDK
NLPNEKVLPKHSLLYEYFTVYNELTKVKYVTEGMRKPAFLSGEQKKAIVD
LLFKTNRKVTVKQLKEDYFKKIECFDSVEISGVEDRFNASLGTYHDLLKI
IKDKDFLDNEENEDILEDIVLTLTLFEDREMIEERLKTYAHLFDDKVMKQ
LKRRRYTGWGRLSRKLINGIRDKQSGKTILDFLKSDGFANRNFMQLIHDD
SLTFKEDIQKAQVSGQGDSLHEHIANLAGSPAIKKGILQTVKVVDELVKV
MGRHKPENIVIEMARENQTTQKGQKNSRERMKRIEEGIKELGSQILKEHP
VENTQLQNEKLYLYYLQNGRDMYVDQELDINRLSDYDVDHIVPQSFLKDD
SIDNKVLTRSDKNRGKSDNVPSEEVVKKMKNYWRQLLNAKLITQRKFDNL
TKAERGGLSELDKAGFIKRQLVETRQITKHVAQILDSRMNTKYDENDKLI
REVKVITLKSKLVSDFRKDFQFYKVREINNYHHAHDAYLNAVVGTALIKK
YPKLESEFVYGDYKVYDVRKMIAKSEQEIGKATAKYFFYSNIMNFFKTEI
TLANGEIRKRPLIETNGETGEIVWDKGRDFATVRKVLSMPQVNIVKKTEV
QTGGFSKESILPKRNSDKLIARKKDWDPKKYGGFDSPTVAYSVLVVAKVE
KGKSKKLKSVKELLGITIMERSSFEKNPIDFLEAKGYKEVKKDLIIKLPK
YSLFELENGRKRMLASAGELQKGNELALPSKYVNFLYLASHYEKLKGSPG
SSGSSGSETPGTSESATPESSGSEVEFSHEYWMRHALTLAKRARDEREVP
VGAVLVLNNRVIGEGWNRAIGLHDPTAHAEIMALRQGGLVMQNYRLIDAT
LYVTFEPCVMCAGAMIHSRIGRVVFGVRNAKTGAAGSLMDVLHYPGMNHR
VEITEGILADECAALLCYFFRMPREDNEQKQLFVEQHKHYLDEIIEQISE
FSKRVILADANLDKVLSAYNKHRDKPIREQAENIIHLFTLTNLGAPAAFK
YFDTTIDRKRYTSTKEVLDATLIHQSITGLYETRIDLSQLGGD
110.3 Cas9 TadAins 1250
(SEQ ID NO: 165)
MDKKYSIGLAIGTNSVGWAVITDEYKVPSKKFKVLGNTDRHSIKKNLIGA
LLFDSGETAEATRLKRTARRRYTRRKNRICYLQEIFSNEMAKVDDSFFHR
LEESFLVEEDKKHERHPIFGNIVDEVAYHEKYPTIYHLRKKLVDSTDKAD
LRLIYLALAHMIKFRGHFLIEGDLNPDNSDVDKLFIQLVQTYNQLFEENP
INASGVDAKAILSARLSKSRRLENLIAQLPGEKKNGLFGNLIALSLGLTP
NFKSNFDLAEDAKLQLSKDTYDDDLDNLLAQIGDQYADLFLAAKNLSDAI
LLSDILRVNTEITKAPLSASMIKRYDEHHQDLTLLKALVRQQLPEKYKEI
FFDQSKNGYAGYIDGGASQEEFYKFIKPILEKMDGTEELLVKLNREDLLR
KQRTFDNGSIPHQIHLGELHAILRRQEDFYPFLKDNREKIEKILTFRIPY
YVGPLARGNSRFAWMTRKSEETITPWNFEEVVDKGASAQSFIERMTNFDK
NLPNEKVLPKHSLLYEYFTVYNELTKVKYVTEGMRKPAFLSGEQKKAIVD
LLFKTNRKVTVKQLKEDYFKKIECFDSVEISGVEDRFNASLGTYHDLLKI
IKDKDFLDNEENEDILEDIVLTLTLFEDREMIEERLKTYAHLFDDKVMKQ
LKRRRYTGWGRLSRKLINGIRDKQSGKTILDFLKSDGFANRNFMQLIHDD
SLTFKEDIQKAQVSGQGDSLHEHIANLAGSPAIKKGILQTVKVVDELVKV
MGRHKPENIVIEMARENQTTQKGQKNSRERMKRIEEGIKELGSQILKEHP
VENTQLQNEKLYLYYLQNGRDMYVDQELDINRLSDYDVDHIVPQSFLKDD
SIDNKVLTRSDKNRGKSDNVPSEEVVKKMKNYWRQLLNAKLITQRKFDNL
TKAERGGLSELDKAGFIKRQLVETRQITKHVAQILDSRMNTKYDENDKLI
REVKVITLKSKLVSDFRKDFQEYKVREINNYHHAHDAYLNAVVGTALIKK
YPKLESEFVYGDYKVYDVRKMIAKSEQEIGKATAKYFFYSNIMNFFKTEI
TLANGEIRKRPLIETNGETGEIVWDKGRDFATVRKVLSMPQVNIVKKTEV
QTGGFSKESILPKRNSDKLIARKKDWDPKKYGGFDSPTVAYSVLVVAKVE
KGKSKKLKSVKELLGITIMERSSFEKNPIDFLEAKGYKEVKKDLIIKLPK
YSLFELENGRKRMLASAGELQKGNELALPSKYVNFLYLASHYEKLKGSPG
SSGSSGSETPGTSESATPESGSSSGSEVEFSHEYWMRHALTLAKRARDER
EVPVGAVLVLNNRVIGEGWNRAIGLHDPTAHAEIMALRQGGLVMQNYRLI
DATLYVTFEPCVMCAGAMIHSRIGRVVFGVRNARTGAAGSLMDVLHYPGM
NHRVEITEGILADECAALLCYFFRMPREDNEQKQLFVEQHKHYLDEIIEQ
ISEFSKRVILADANLDKVLSAYNKHRDKPIREQAENIIHLFTLTNLGAPA
AFKYFDTTIDRKRYTSTKEVLDATLIHQSITGLYETRIDLSQLGGD
110.4 Cas9 TadAins 1250
(SEQ ID NO: 166)
MDKKYSIGLAIGTNSVGWAVITDEYKVPSKKFKVLGNTDRHSIKKNLIGA
LLFDSGETAEATRLKRTARRRYTRRKNRICYLQEIFSNEMAKVDDSFFHR
LEESFLVEEDKKHERHPIFGNIVDEVAYHEKYPTIYHLRKKLVDSTDKAD
LRLIYLALAHMIKFRGHFLIEGDLNPDNSDVDKLFIQLVQTYNQLFEENP
INASGVDAKAILSARLSKSRRLENLIAQLPGEKKNGLFGNLIALSLGLTP
NFKSNFDLAEDAKLQLSKDTYDDDLDNLLAQIGDQYADLFLAAKNLSDAI
LLSDILRVNTEITKAPLSASMIKRYDEHHQDLTLLKALVRQQLPEKYKEI
FFDQSKNGYAGYIDGGASQEEFYKFIKPILEKMDGTEELLVKLNREDLLR
KQRTFDNGSIPHQIHLGELHAILRRQEDFYPFLKDNREKIEKILTFRIPY
YVGPLARGNSRFAWMTRKSEETITPWNFEEVVDKGASAQSFIERMTNFDK
NLPNEKVLPKHSLLYEYFTVYNELTKVKYVTEGMRKPAFLSGEQKKAIVD
LLFKTNRKVTVKQLKEDYFKKIECFDSVEISGVEDRFNASLGTYHDLLKI
IKDKDFLDNEENEDILEDIVLTLTLFEDREMIEERLKTYAHLFDDKVMKQ
LKRRRYTGWGRLSRKLINGIRDKQSGKTILDFLKSDGFANRNFMQLIHDD
SLTFKEDIQKAQVSGQGDSLHEHIANLAGSPAIKKGILQTVKVVDELVKV
MGRHKPENIVIEMARENQTTQKGQKNSRERMKRIEEGIKELGSQILKEHP
VENTQLQNEKLYLYYLQNGRDMYVDQELDINRLSDYDVDHIVPQSFLKDD
SIDNKVLTRSDKNRGKSDNVPSEEVVKKMKNYWRQLLNAKLITQRKFDNL
TKAERGGLSELDKAGFIKRQLVETRQITKHVAQILDSRMNTKYDENDKLI
REVKVITLKSKLVSDFRKDFQFYKVREINNYHHAHDAYLNAVVGTALIKK
YPKLESEFVYGDYKVYDVRKMIAKSEQEIGKATAKYFFYSNIMNFFKTEI
TLANGEIRKRPLIETNGETGEIVWDKGRDFATVRKVLSMPQVNIVKKTEV
QTGGFSKESILPKRNSDKLIARKKDWDPKKYGGFDSPTVAYSVLVVAKVE
KGKSKKLKSVKELLGITIMERSSFEKNPIDFLEAKGYKEVKKDLIIKLPK
YSLFELENGRKRMLASAGELQKGNELALPSKYVNFLYLASHYEKLKGSPG
SSGSSGSETPGTSESATPESGSSSGSEVEFSHEYWMRHALTLAKRARDER
EVPVGAVLVLNNRVIGEGWNRAIGLHDPTAHAEIMALRQGGLVMQNYRLI
DATLYVTFEPCVMCAGAMIHSRIGRVVFGVRNARTGAAGSLMDVLHYPGM
NHRVEITEGILADECAALLCYFFRMRREDNEQKQLFVEQHKHYLDEIIEQ
ISEFSKRVILADANLDKVLSAYNKHRDKPIREQAENIIHLFTLTNLGAPA
AFKYFDTTIDRKRYTSTKEVLDATLIHQSITGLYETRIDLSQLGGD
110.5 Cas9 TadAins 1249
(SEQ ID NO: 167)
MDKKYSIGLAIGTNSVGWAVITDEYKVPSKKFKVLGNTDRHSIKKNLIGA
LLFDSGETAEATRLKRTARRRYTRRKNRICYLQEIFSNEMAKVDDSFFHR
LEESFLVEEDKKHERHPIFGNIVDEVAYHEKYPTIYHLRKKLVDSTDKAD
LRLIYLALAHMIKFRGHFLIEGDLNPDNSDVDKLFIQLVQTYNQLFEENP
INASGVDAKAILSARLSKSRRLENLIAQLPGEKKNGLFGNLIALSLGLTP
NFKSNFDLAEDAKLQLSKDTYDDDLDNLLAQIGDQYADLFLAAKNLSDAI
LLSDILRVNTEITKAPLSASMIKRYDEHHQDLTLLKALVRQQLPEKYKEI
FFDQSKNGYAGYIDGGASQEEFYKFIKPILEKMDGTEELLVKLNREDLLR
KQRTFDNGSIPHQIHLGELHAILRRQEDFYPFLKDNREKIEKILTFRIPY
YVGPLARGNSRFAWMTRKSEETITPWNFEEVVDKGASAQSFIERMTNFDK
NLPNEKVLPKHSLLYEYFTVYNELTKVKYVTEGMRKPAFLSGEQKKAIVD
LLFKTNRKVTVKQLKEDYFKKIECFDSVEISGVEDRFNASLGTYHDLLKI
IKDKDFLDNEENEDILEDIVLTLTLFEDREMIEERLKTYAHLFDDKVMKQ
LKRRRYTGWGRLSRKLINGIRDKQSGKTILDFLKSDGFANRNFMQLIHDD
SLTFKEDIQKAQVSGQGDSLHEHIANLAGSPAIKKGILQTVKVVDELVKV
MGRHKPENIVIEMARENQTTQKGQKNSRERMKRIEEGIKELGSQILKEHP
VENTQLQNEKLYLYYLQNGRDMYVDQELDINRLSDYDVDHIVPQSFLKDD
SIDNKVLTRSDKNRGKSDNVPSEEVVKKMKNYWRQLLNAKLITQRKFDNL
TKAERGGLSELDKAGFIKRQLVETRQITKHVAQILDSRMNTKYDENDKLI
REVKVITLKSKLVSDFRKDFQFYKVREINNYHHAHDAYLNAVVGTALIKK
YPKLESEFVYGDYKVYDVRKMIAKSEQEIGKATAKYFFYSNIMNFFKTEI
TLANGEIRKRPLIETNGETGEIVWDKGRDFATVRKVLSMPQVNIVKKTEV
QTGGFSKESILPKRNSDKLIARKKDWDPKKYGGFDSPTVAYSVLVVAKVE
KGKSKKLKSVKELLGITIMERSSFEKNPIDFLEAKGYKEVKKDLIIKLPK
YSLFELENGRKRMLASAGELQKGNELALPSKYVNFLYLASHYEKLKGSGS
SGSSGSETPGTSESATPESGSSSGSEVEFSHEYWMRHALTLAKRARDERE
VPVGAVLVLNNRVIGEGWNRAIGLHDPTAHAEIMALRQGGLVMQNYRLID
ATLYVTFEPCVMCAGAMIHSRIGRVVFGVRNAKTGAAGSLMDVLHYPGMN
HRVEITEGILADECAALLCYFFRMRRPEDNEQKQLFVEQHKHYLDEIIEQ
ISEFSKRVILADANLDKVLSAYNKHRDKPIREQAENIIHLFTLTNLGAPA
AFKYFDTTIDRKRYTSTKEVLDATLIHQSITGLYETRIDLSQLGGD
110.5 Cas9 TadAins delta 59-66 1250
(SEQ ID NO: 168)
MDKKYSIGLAIGTNSVGWAVITDEYKVPSKKFKVLGNTDRHSIKKNLIGA
LLFDSGETAEATRLKRTARRRYTRRKNRICYLQEIFSNEMAKVDDSFFHR
LEESFLVEEDKKHERHPIFGNIVDEVAYHEKYPTIYHLRKKLVDSTDKAD
LRLIYLALAHMIKFRGHFLIEGDLNPDNSDVDKLFIQLVQTYNQLFEENP
INASGVDAKAILSARLSKSRRLENLIAQLPGEKKNGLFGNLIALSLGLTP
NFKSNFDLAEDAKLQLSKDTYDDDLDNLLAQIGDQYADLFLAAKNLSDAI
LLSDILRVNTEITKAPLSASMIKRYDEHHQDLTLLKALVRQQLPEKYKEI
FFDQSKNGYAGYIDGGASQEEFYKFIKPILEKMDGTEELLVKLNREDLLR
KQRTFDNGSIPHQIHLGELHAILRRQEDFYPFLKDNREKIEKILTFRIPY
YVGPLARGNSRFAWMTRKSEETITPWNFEEVVDKGASAQSFIERMTNFDK
NLPNEKVLPKHSLLYEYFTVYNELTKVKYVTEGMRKPAFLSGEQKKAIVD
LLFKTNRKVTVKQLKEDYFKKIECFDSVEISGVEDRFNASLGTYHDLLKI
IKDKDFLDNEENEDILEDIVLTLTLFEDREMIEERLKTYAHLFDDKVMKQ
LKRRRYTGWGRLSRKLINGIRDKQSGKTILDFLKSDGFANRNFMQLIHDD
SLTFKEDIQKAQVSGQGDSLHEHIANLAGSPAIKKGILQTVKVVDELVKV
MGRHKPENIVIEMARENQTTQKGQKNSRERMKRIEEGIKELGSQILKEHP
VENTQLQNEKLYLYYLQNGRDMYVDQELDINRLSDYDVDHIVPQSFLKDD
SIDNKVLTRSDKNRGKSDNVPSEEVVKKMKNYWRQLLNAKLITQRKFDNL
TKAERGGLSELDKAGFIKRQLVETRQITKHVAQILDSRMNTKYDENDKLI
REVKVITLKSKLVSDFRKDFQFYKVREINNYHHAHDAYLNAVVGTALIKK
YPKLESEFVYGDYKVYDVRKMIAKSEQEIGKATAKYFFYSNIMNFFKTEI
TLANGEIRKRPLIETNGETGEIVWDKGRDFATVRKVLSMPQVNIVKKTEV
QTGGFSKESILPKRNSDKLIARKKDWDPKKYGGFDSPTVAYSVLVVAKVE
KGKSKKLKSVKELLGITIMERSSFEKNPIDFLEAKGYKEVKKDLIIKLPK
YSLFELENGRKRMLASAGELQKGNELALPSKYVNFLYLASHYEKLKGSPG
SSGSSGSETPGTSESATPESGSSGSEVEFSHEYWMRHALTLAKRARDERE
VPVGAVLVLNNRVIGEGWNRAHAEIMALRQGGLVMQNYRLIDATLYVTFE
PCVMCAGAMIHSRIGRVVFGVRNARTGAAGSLMDVLHYPGMNHRVEITEG
ILADECAALLCYFFRMPRQVFNAQKKAQSSTDEDNEQKQLFVEQHKHYLD
EIIEQISEFSKRVILADANLDKVLSAYNKHRDKPIREQAENIIHLFTLTN
LGAPAAFKYFDTTIDRKRYTSTKEVLDATLIHQSITGLYETRIDLSQLGG
D
110.6 Cas9 TadAins 1251
(SEQ ID NO: 169)
MDKKYSIGLAIGTNSVGWAVITDEYKVPSKKFKVLGNTDRHSIKKNLIGA
LLFDSGETAEATRLKRTARRRYTRRKNRICYLQEIFSNEMAKVDDSFFHR
LEESFLVEEDKKHERHPIFGNIVDEVAYHEKYPTIYHLRKKLVDSTDKAD
LRLIYLALAHMIKFRGHFLIEGDLNPDNSDVDKLFIQLVQTYNQLFEENP
INASGVDAKAILSARLSKSRRLENLIAQLPGEKKNGLFGNLIALSLGLTP
NFKSNFDLAEDAKLQLSKDTYDDDLDNLLAQIGDQYADLFLAAKNLSDAI
LLSDILRVNTEITKAPLSASMIKRYDEHHQDLTLLKALVRQQLPEKYKEI
FFDQSKNGYAGYIDGGASQEEFYKFIKPILEKMDGTEELLVKLNREDLLR
KQRTFDNGSIPHQIHLGELHAILRRQEDFYPFLKDNREKIEKILTFRIPY
YVGPLARGNSRFAWMTRKSEETITPWNFEEVVDKGASAQSFIERMTNFDK
NLPNEKVLPKHSLLYEYFTVYNELTKVKYVTEGMRKPAFLSGEQKKAIVD
LLFKTNRKVTVKQLKEDYFKKIECFDSVEISGVEDRFNASLGTYHDLLKI
IKDKDFLDNEENEDILEDIVLTLTLFEDREMIEERLKTYAHLFDDKVMKQ
LKRRRYTGWGRLSRKLINGIRDKQSGKTILDFLKSDGFANRNFMQLIHDD
SLTFKEDIQKAQVSGQGDSLHEHIANLAGSPAIKKGILQTVKVVDELVKV
MGRHKPENIVIEMARENQTTQKGQKNSRERMKRIEEGIKELGSQILKEHP
VENTQLQNEKLYLYYLQNGRDMYVDQELDINRLSDYDVDHIVPQSFLKDD
SIDNKVLTRSDKNRGKSDNVPSEEVVKKMKNYWRQLLNAKLITQRKFDNL
TKAERGGLSELDKAGFIKRQLVETRQITKHVAQILDSRMNTKYDENDKLI
REVKVITLKSKLVSDFRKDFQFYKVREINNYHHAHDAYLNAVVGTALIKK
YPKLESEFVYGDYKVYDVRKMIAKSEQEIGKATAKYFFYSNIMNFFKTEI
TLANGEIRKRPLIETNGETGEIVWDKGRDFATVRKVLSMPQVNIVKKTEV
QTGGFSKESILPKRNSDKLIARKKDWDPKKYGGFDSPTVAYSVLVVAKVE
KGKSKKLKSVKELLGITIMERSSFEKNPIDFLEAKGYKEVKKDLIIKLPK
YSLFELENGRKRMLASAGELQKGNELALPSKYVNFLYLASHYEKLKGSPE
GSSGSSGSETPGTSESATPESGSSSGSEVEFSHEYWMRHALTLAKRARDE
REVPVGAVLVLNNRVIGEGWNRAIGLHDPTAHAEIMALRQGGLVMQNYRL
IDATLYVTFEPCVMCAGAMIHSRIGRVVFGVRNAKTGAAGSLMDVLHYPG
MNHRVEITEGILADECAALLCYFFRMRRDNEQKQLFVEQHKHYLDEIIEQ
ISEFSKRVILADANLDKVLSAYNKHRDKPIREQAENIIHLFTLTNLGAPA
AFKYFDTTIDRKRYTSTKEVLDATLIHQSITGLYETRIDLSQLGGD
110.7 Cas9 TadAins 1252
(SEQ ID NO: 170)
MDKKYSIGLAIGTNSVGWAVITDEYKVPSKKFKVLGNTDRHSIKKNLIGA
LLFDSGETAEATRLKRTARRRYTRRKNRICYLQEIFSNEMAKVDDSFFHR
LEESFLVEEDKKHERHPIFGNIVDEVAYHEKYPTIYHLRKKLVDSTDKAD
LRLIYLALAHMIKFRGHFLIEGDLNPDNSDVDKLFIQLVQTYNQLFEENP
INASGVDAKAILSARLSKSRRLENLIAQLPGEKKNGLFGNLIALSLGLTP
NFKSNFDLAEDAKLQLSKDTYDDDLDNLLAQIGDQYADLFLAAKNLSDAI
LLSDILRVNTEITKAPLSASMIKRYDEHHQDLTLLKALVRQQLPEKYKEI
FFDQSKNGYAGYIDGGASQEEFYKFIKPILEKMDGTEELLVKLNREDLLR
KQRTFDNGSIPHQIHLGELHAILRRQEDFYPFLKDNREKIEKILTFRIPY
YVGPLARGNSRFAWMTRKSEETITPWNFEEVVDKGASAQSFIERMTNFDK
NLPNEKVLPKHSLLYEYFTVYNELTKVKYVTEGMRKPAFLSGEQKKAIVD
LLFKTNRKVTVKQLKEDYFKKIECFDSVEISGVEDRFNASLGTYHDLLKI
IKDKDFLDNEENEDILEDIVLTLTLFEDREMIEERLKTYAHLFDDKVMKQ
LKRRRYTGWGRLSRKLINGIRDKQSGKTILDFLKSDGFANRNFMQLIHDD
SLTFKEDIQKAQVSGQGDSLHEHIANLAGSPAIKKGILQTVKVVDELVKV
MGRHKPENIVIEMARENQTTQKGQKNSRERMKRIEEGIKELGSQILKEHP
VENTQLQNEKLYLYYLQNGRDMYVDQELDINRLSDYDVDHIVPQSFLKDD
SIDNKVLTRSDKNRGKSDNVPSEEVVKKMKNYWRQLLNAKLITQRKFDNL
TKAERGGLSELDKAGFIKRQLVETRQITKHVAQILDSRMNTKYDENDKLI
REVKVITLKSKLVSDFRKDFQFYKVREINNYHHAHDAYLNAVVGTALIKK
YPKLESEFVYGDYKVYDVRKMIAKSEQEIGKATAKYFFYSNIMNFFKTEI
TLANGEIRKRPLIETNGETGEIVWDKGRDFATVRKVLSMPQVNIVKKTEV
QTGGFSKESILPKRNSDKLIARKKDWDPKKYGGFDSPTVAYSVLVVAKVE
KGKSKKLKSVKELLGITIMERSSFEKNPIDFLEAKGYKEVKKDLIIKLPK
YSLFELENGRKRMLASAGELQKGNELALPSKYVNFLYLASHYEKLKGSPE
DGSSGSSGSETPGTSESATPESGSSSGSEVEFSHEYWMRHALTLAKRARD
EREVPVGAVLVLNNRVIGEGWNRAIGLHDPTAHAEIMALRQGGLVMQNYR
LIDATLYVTFEPCVMCAGAMIHSRIGRVVFGVRNAKTGAAGSLMDVLHYP
GMNHRVEITEGILADECAALLCYFFRMRRNEQKQLFVEQHKHYLDEIIEQ
ISEFSKRVILADANLDKVLSAYNKHRDKPIREQAENIIHLFTLTNLGAPA
AFKYFDTTIDRKRYTSTKEVLDATLIHQSITGLYETRIDLSQLGGD
110.8 Cas9 TadAins delta 59-66 C-truncate 1250
(SEQ ID NO: 171)
MDKKYSIGLAIGTNSVGWAVITDEYKVPSKKFKVLGNTDRHSIKKNLIGA
LLFDSGETAEATRLKRTARRRYTRRKNRICYLQEIFSNEMAKVDDSFFHR
LEESFLVEEDKKHERHPIFGNIVDEVAYHEKYPTIYHLRKKLVDSTDKAD
LRLIYLALAHMIKFRGHFLIEGDLNPDNSDVDKLFIQLVQTYNQLFEENP
INASGVDAKAILSARLSKSRRLENLIAQLPGEKKNGLFGNLIALSLGLTP
NFKSNFDLAEDAKLQLSKDTYDDDLDNLLAQIGDQYADLFLAAKNLSDAI
LLSDILRVNTEITKAPLSASMIKRYDEHHQDLTLLKALVRQQLPEKYKEI
FFDQSKNGYAGYIDGGASQEEFYKFIKPILEKMDGTEELLVKLNREDLLR
KQRTFDNGSIPHQIHLGELHAILRRQEDFYPFLKDNREKIEKILTFRIPY
YVGPLARGNSRFAWMTRKSEETITPWNFEEVVDKGASAQSFIERMTNFDK
NLPNEKVLPKHSLLYEYFTVYNELTKVKYVTEGMRKPAFLSGEQKKAIVD
LLFKTNRKVTVKQLKEDYFKKIECFDSVEISGVEDRFNASLGTYHDLLKI
IKDKDFLDNEENEDILEDIVLTLTLFEDREMIEERLKTYAHLFDDKVMKQ
LKRRRYTGWGRLSRKLINGIRDKQSGKTILDFLKSDGFANRNFMQLIHDD
SLTFKEDIQKAQVSGQGDSLHEHIANLAGSPAIKKGILQTVKVVDELVKV
MGRHKPENIVIEMARENQTTQKGQKNSRERMKRIEEGIKELGSQILKEHP
VENTQLQNEKLYLYYLQNGRDMYVDQELDINRLSDYDVDHIVPQSFLKDD
SIDNKVLTRSDKNRGKSDNVPSEEVVKKMKNYWRQLLNAKLITQRKFDNL
TKAERGGLSELDKAGFIKRQLVETRQITKHVAQILDSRMNTKYDENDKLI
REVKVITLKSKLVSDFRKDFQFYKVREINNYHHAHDAYLNAVVGTALIKK
YPKLESEFVYGDYKVYDVRKMIAKSEQEIGKATAKYFFYSNIMNFFKTEI
TLANGEIRKRPLIETNGETGEIVWDKGRDFATVRKVLSMPQVNIVKKTEV
QTGGFSKESILPKRNSDKLIARKKDWDPKKYGGFDSPTVAYSVLVVAKVE
KGKSKKLKSVKELLGITIMERSSFEKNPIDFLEAKGYKEVKKDLIIKLPK
YSLFELENGRKRMLASAGELQKGNELALPSKYVNFLYLASHYEKLKGSPG
SSGSETPGTSESATPESSGSEVEFSHEYWMRHALTLAKRARDEREVPVGA
VLVLNNRVIGEGWNRAHAEIMALRQGGLVMQNYRLIDATLYVTFEPCVMC
AGAMIHSRIGRVVFGVRNAKTGAAGSLMDVLHYPGMNHRVEITEGILADE
CAALLCYFFRMPRQEDNEQKQLFVEQHKHYLDEIIEQISEFSKRVILADA
NLDKVLSAYNKHRDKPIREQAENIIHLFTLTNLGAPAAFKYFDTTIDRKR
YTSTKEVLDATLIHQSITGLYETRIDLSQLGGD
111.1 Cas9 TadAins 997
(SEQ ID NO: 172)
MDKKYSIGLAIGTNSVGWAVITDEYKVPSKKFKVLGNTDRHSIKKNLIGA
LLFDSGETAEATRLKRTARRRYTRRKNRICYLQEIFSNEMAKVDDSFFHR
LEESFLVEEDKKHERHPIFGNIVDEVAYHEKYPTIYHLRKKLVDSTDKAD
LRLIYLALAHMIKFRGHFLIEGDLNPDNSDVDKLFIQLVQTYNQLFEENP
INASGVDAKAILSARLSKSRRLENLIAQLPGEKKNGLFGNLIALSLGLTP
NFKSNFDLAEDAKLQLSKDTYDDDLDNLLAQIGDQYADLFLAAKNLSDAI
LLSDILRVNTEITKAPLSASMIKRYDEHHQDLTLLKALVRQQLPEKYKEI
FFDQSKNGYAGYIDGGASQEEFYKFIKPILEKMDGTEELLVKLNREDLLR
KQRTFDNGSIPHQIHLGELHAILRRQEDFYPFLKDNREKIEKILTFRIPY
YVGPLARGNSRFAWMTRKSEETITPWNFEEVVDKGASAQSFIERMTNFDK
NLPNEKVLPKHSLLYEYFTVYNELTKVKYVTEGMRKPAFLSGEQKKAIVD
LLFKTNRKVTVKQLKEDYFKKIECFDSVEISGVEDRFNASLGTYHDLLKI
IKDKDFLDNEENEDILEDIVLTLTLFEDREMIEERLKTYAHLFDDKVMKQ
LKRRRYTGWGRLSRKLINGIRDKQSGKTILDFLKSDGFANRNFMQLIHDD
SLTFKEDIQKAQVSGQGDSLHEHIANLAGSPAIKKGILQTVKVVDELVKV
MGRHKPENIVIEMARENQTTQKGQKNSRERMKRIEEGIKELGSQILKEHP
VENTQLQNEKLYLYYLQNGRDMYVDQELDINRLSDYDVDHIVPQSFLKDD
SIDNKVLTRSDKNRGKSDNVPSEEVVKKMKNYWRQLLNAKLITQRKFDNL
TKAERGGLSELDKAGFIKRQLVETRQITKHVAQILDSRMNTKYDENDKLI
REVKVITLKSKLVSDFRKDFQFYKVREINNYHHAHDAYLNAVVGTALSHE
YWMRHALTLAKRARDEREVPVGAVLVLNNRVIGEGWNRAIGLHDPTAHAE
IMALRQGGLVMQNYRLIDATLYVTFEPCVMCAGAMIHSRIGRVVFGVRNA
KTGAAGSLMDVLHYPGMNHRVEITEGILADECAALLCYFFRMPRQVFNAQ
KKAQSSTDGSSGSETPGTSESATPESSGIKKYPKLESEFVYGDYKVYDVR
KMIAKSEQEIGKATAKYFFYSNIMNFFKTEITLANGEIRKRPLIETNGET
GEIVWDKGRDFATVRKVLSMPQVNIVKKTEVQTGGFSKESILPKRNSDKL
IARKKDWDPKKYGGFDSPTVAYSVLVVAKVEKGKSKKLKSVKELLGITIM
ERSSFEKNPIDFLEAKGYKEVKKDLIIKLPKYSLFELENGRKRMLASAGE
LQKGNELALPSKYVNFLYLASHYEKLKGSPEDNEQKQLFVEQHKHYLDEI
IEQISEFSKRVILADANLDKVLSAYNKHRDKPIREQAENIIHLFTLTNLG
APAAFKYFDTTIDRKRYTSTKEVLDATLIHQSITGLYETRIDLSQLGGD
111.2 Cas9 TadAins 997
(SEQ ID NO: 173)
MDKKYSIGLAIGTNSVGWAVITDEYKVPSKKFKVLGNTDRHSIKKNLIGA
LLFDSGETAEATRLKRTARRRYTRRKNRICYLQEIFSNEMAKVDDSFFHR
LEESFLVEEDKKHERHPIFGNIVDEVAYHEKYPTIYHLRKKLVDSTDKAD
LRLIYLALAHMIKFRGHFLIEGDLNPDNSDVDKLFIQLVQTYNQLFEENP
INASGVDAKAILSARLSKSRRLENLIAQLPGEKKNGLFGNLIALSLGLTP
NFKSNFDLAEDAKLQLSKDTYDDDLDNLLAQIGDQYADLFLAAKNLSDAI
LLSDILRVNTEITKAPLSASMIKRYDEHHQDLTLLKALVRQQLPEKYKEI
FFDQSKNGYAGYIDGGASQEEFYKFIKPILEKMDGTEELLVKLNREDLLR
KQRTFDNGSIPHQIHLGELHAILRRQEDFYPFLKDNREKIEKILTFRIPY
YVGPLARGNSRFAWMTRKSEETITPWNFEEVVDKGASAQSFIERMTNFDK
NLPNEKVLPKHSLLYEYFTVYNELTKVKYVTEGMRKPAFLSGEQKKAIVD
LLFKTNRKVTVKQLKEDYFKKIECFDSVEISGVEDRFNASLGTYHDLLKI
IKDKDFLDNEENEDILEDIVLTLTLFEDREMIEERLKTYAHLFDDKVMKQ
LKRRRYTGWGRLSRKLINGIRDKQSGKTILDFLKSDGFANRNFMQLIHDD
SLTFKEDIQKAQVSGQGDSLHEHIANLAGSPAIKKGILQTVKVVDELVKV
MGRHKPENIVIEMARENQTTQKGQKNSRERMKRIEEGIKELGSQILKEHP
VENTQLQNEKLYLYYLQNGRDMYVDQELDINRLSDYDVDHIVPQSFLKDD
SIDNKVLTRSDKNRGKSDNVPSEEVVKKMKNYWRQLLNAKLITQRKFDNL
TKAERGGLSELDKAGFIKRQLVETRQITKHVAQILDSRMNTKYDENDKLI
REVKVITLKSKLVSDFRKDFQFYKVREINNYHHAHDAYLNAVVGTALSHE
YWMRHALTLAKRARDEREVPVGAVLVLNNRVIGEGWNRAIGLHDPTAHAE
IMALRQGGLVMQNYRLIDATLYVTFEPCVMCAGAMIHSRIGRVVFGVRNA
KTGAAGSLMDVLHYPGMNHRVEITEGILADECAALLCYFFRMPRQVFNAQ
KKAQSSTDGSSGSSGSETPGTSESATPESSGGSSIKKYPKLESEFVYGDY
KVYDVRKMIAKSEQEIGKATAKYFFYSNIMNFFKTEITLANGEIRKRPLI
ETNGETGEIVWDKGRDFATVRKVLSMPQVNIVKKTEVQTGGFSKESILPK
RNSDKLIARKKDWDPKKYGGFDSPTVAYSVLVVAKVEKGKSKKLKSVKEL
LGITIMERSSFEKNPIDFLEAKGYKEVKKDLIIKLPKYSLFELENGRKRM
LASAGELQKGNELALPSKYVNFLYLASHYEKLKGSPEDNEQKQLFVEQHK
HYLDEIIEQISEFSKRVILADANLDKVLSAYNKHRDKPIREQAENIIHLF
TLTNLGAPAAFKYFDTTIDRKRYTSTKEVLDATLIHQSITGLYETRIDLS
QLGGD
112 delta HNH TadA
(SEQ ID NO: 174)
MDKKYSIGLAIGTNSVGWAVITDEYKVPSKKFKVLGNTDRHSIKKNLIGA
LLFDSGETAEATRLKRTARRRYTRRKNRICYLQEIFSNEMAKVDDSFFHR
LEESFLVEEDKKHERHPIFGNIVDEVAYHEKYPTIYHLRKKLVDSTDKAD
LRLIYLALAHMIKFRGHFLIEGDLNPDNSDVDKLFIQLVQTYNQLFEENP
INASGVDAKAILSARLSKSRRLENLIAQLPGEKKNGLFGNLIALSLGLTP
NFKSNFDLAEDAKLQLSKDTYDDDLDNLLAQIGDQYADLFLAAKNLSDAI
LLSDILRVNTEITKAPLSASMIKRYDEHHQDLTLLKALVRQQLPEKYKEI
FFDQSKNGYAGYIDGGASQEEFYKFIKPILEKMDGTEELLVKLNREDLLR
KQRTFDNGSIPHQIHLGELHAILRRQEDFYPFLKDNREKIEKILTFRIPY
YVGPLARGNSRFAWMTRKSEETITPWNFEEVVDKGASAQSFIERMTNFDK
NLPNEKVLPKHSLLYEYFTVYNELTKVKYVTEGMRKPAFLSGEQKKAIVD
LLFKTNRKVTVKQLKEDYFKKIECFDSVEISGVEDRFNASLGTYHDLLKI
IKDKDFLDNEENEDILEDIVLTLTLFEDREMIEERLKTYAHLFDDKVMKQ
LKRRRYTGWGRLSRKLINGIRDKQSGKTILDFLKSDGFANRNFMQLIHDD
SLTFKEDIQKAQVSGQGDSLHEHIANLAGSPAIKKGILQTVKVVDELVKV
MGRHKPENIVIEMARENQTTQKGQKNSRERMKRIEEGIKELGSEVEFSHE
YWMRHALTLAKRARDEREVPVGAVLVLNNRVIGEGWNRAIGLHDPTAHAE
IMALRQGGLVMQNYRLIDATLYVTFEPCVMCAGAMIHSRIGRVVFGVRNA
KTGAAGSLMDVLHYPGMNHRVEITEGILADECAALLCYFFRMPRQVFNAQ
KKAQSSTDGGLSELDKAGFIKRQLVETRQITKHVAQILDSRMNTKYDEND
KLIREVKVITLKSKLVSDFRKDFQFYKVREINNYHHAHDAYLNAVVGTAL
IKKYPKLESEFVYGDYKVYDVRKMIAKSEQEIGKATAKYFFYSNIMNFFK
TEITLANGEIRKRPLIETNGETGEIVWDKGRDFATVRKVLSMPQVNIVKK
TEVQTGGFSKESILPKRNSDKLIARKKDWDPKKYGGFDSPTVAYSVLVVA
KVEKGKSKKLKSVKELLGITIMERSSFEKNPIDFLEAKGYKEVKKDLIIK
LPKYSLFELENGRKRMLASAGELQKGNELALPSKYVNFLYLASHYEKLKG
SPEDNEQKQLFVEQHKHYLDEIIEQISEFSKRVILADANLDKVLSAYNKH
RDKPIREQAENIIHLFTLTNLGAPAAFKYFDTTIDRKRYTSTKEVLDATL
IHQSITGLYETRIDLSQLGGD
113 N-term single TadA helix trunc 165-end
(SEQ ID NO: 175)
MSEVEFSHEYWMRHALTLAKRARDEREVPVGAVLVLNNRVIGEGWNRAIG
LHDPTAHAEIMALRQGGLVMQNYRLIDATLYVTFEPCVMCAGAMIHSRIG
RVVFGVRNAKTGAAGSLMDVLHYPGMNHRVEITEGILADECAALLCYFFR
MPRSGGSSGGSSGSETPGTSESATPESSGGSSGGSDKKYSIGLAIGTNSV
GWAVITDEYKVPSKKFKVLGNTDRHSIKKNLIGALLFDSGETAEATRLKR
TARRRYTRRKNRICYLQEIFSNEMAKVDDSFFHRLEESFLVEEDKKHERH
PIFGNIVDEVAYHEKYPTIYHLRKKLVDSTDKADLRLIYLALAHMIKFRG
HFLIEGDLNPDNSDVDKLFIQLVQTYNQLFEENPINASGVDAKAILSARL
SKSRRLENLIAQLPGEKKNGLFGNLIALSLGLTPNFKSNFDLAEDAKLQL
SKDTYDDDLDNLLAQIGDQYADLFLAAKNLSDAILLSDILRVNTEITKAP
LSASMIKRYDEHHQDLTLLKALVRQQLPEKYKEIFFDQSKNGYAGYIDGG
ASQEEFYKFIKPILEKMDGTEELLVKLNREDLLRKQRTFDNGSIPHQIHL
GELHAILRRQEDFYPFLKDNREKIEKILTFRIPYYVGPLARGNSRFAWMT
RKSEETITPWNFEEVVDKGASAQSFIERMTNFDKNLPNEKVLPKHSLLYE
YFTVYNELTKVKYVTEGMRKPAFLSGEQKKAIVDLLFKTNRKVTVKQLKE
DYFKKIECFDSVEISGVEDRFNASLGTYHDLLKIIKDKDFLDNEENEDIL
EDIVLTLTLFEDREMIEERLKTYAHLFDDKVMKQLKRRRYTGWGRLSRKL
INGIRDKQSGKTILDFLKSDGFANRNFMQLIHDDSLTFKEDIQKAQVSGQ
GDSLHEHIANLAGSPAIKKGILQTVKVVDELVKVMGRHKPENIVIEMARE
NQTTQKGQKNSRERMKRIEEGIKELGSQILKEHPVENTQLQNEKLYLYYL
QNGRDMYVDQELDINRLSDYDVDHIVPQSFLKDDSIDNKVLTRSDKNRGK
SDNVPSEEVVKKMKNYWRQLLNAKLITQRKFDNLTKAERGGLSELDKAGF
IKRQLVETRQITKHVAQILDSRMNTKYDENDKLIREVKVITLKSKLVSDF
RKDFQFYKVREINNYHHAHDAYLNAVVGTALIKKYPKLESEFVYGDYKVY
DVRKMIAKSEQEIGKATAKYFFYSNIMNFFKTEITLANGEIRKRPLIETN
GETGEIVWDKGRDFATVRKVLSMPQVNIVKKTEVQTGGFSKESILPKRNS
DKLIARKKDWDPKKYGGFDSPTVAYSVLVVAKVEKGKSKKLKSVKELLGI
TIMERSSFEKNPIDFLEAKGYKEVKKDLIIKLPKYSLFELENGRKRMLAS
AGELQKGNELALPSKYVNFLYLASHYEKLKGSPEDNEQKQLFVEQHKHYL
DEIIEQISEFSKRVILADANLDKVLSAYNKHRDKPIREQAENIIHLFTLT
NLGAPAAFKYFDTTIDRKRYTSTKEVLDATLIHQSITGLYETRIDLSQLG
GD
114 N-term single TadA helix trunc 165-end delta
59-65
(SEQ ID NO: 176)
MSEVEFSHEYWMRHALTLAKRARDEREVPVGAVLVLNNRVIGEGWNRTAH
AEIMALRQGGLVMQNYRLIDATLYVTFEPCVMCAGAMIHSRIGRVVFGVR
NAKTGAAGSLMDVLHYPGMNHRVEITEGILADECAALLCYFFRMPRSGGS
SGGSSGSETPGTSESATPESSGGSSGGSDKKYSIGLAIGTNSVGWAVITD
EYKVPSKKFKVLGNTDRHSIKKNLIGALLFDSGETAEATRLKRTARRRYT
RRKNRICYLQEIFSNEMAKVDDSFFHRLEESFLVEEDKKHERHPIFGNIV
DEVAYHEKYPTIYHLRKKLVDSTDKADLRLIYLALAHMIKFRGHFLIEGD
LNPDNSDVDKLFIQLVQTYNQLFEENPINASGVDAKAILSARLSKSRRLE
NLIAQLPGEKKNGLFGNLIALSLGLTPNFKSNFDLAEDAKLQLSKDTYDD
DLDNLLAQIGDQYADLFLAAKNLSDAILLSDILRVNTEITKAPLSASMIK
RYDEHHQDLTLLKALVRQQLPEKYKEIFFDQSKNGYAGYIDGGASQEEFY
KFIKPILEKMDGTEELLVKLNREDLLRKQRTFDNGSIPHQIHLGELHAIL
RRQEDFYPFLKDNREKIEKILTFRIPYYVGPLARGNSRFAWMTRKSEETI
TPWNFEEVVDKGASAQSFIERMTNFDKNLPNEKVLPKHSLLYEYFTVYNE
LTKVKYVTEGMRKPAFLSGEQKKAIVDLLFKTNRKVTVKQLKEDYFKKIE
CFDSVEISGVEDRFNASLGTYHDLLKIIKDKDFLDNEENEDILEDIVLTL
TLFEDREMIEERLKTYAHLFDDKVMKQLKRRRYTGWGRLSRKLINGIRDK
QSGKTILDFLKSDGFANRNFMQLIHDDSLTFKEDIQKAQVSGQGDSLHEH
IANLAGSPAIKKGILQTVKVVDELVKVMGRHKPENIVIEMARENQTTQKG
QKNSRERMKRIEEGIKELGSQILKEHPVENTQLQNEKLYLYYLQNGRDMY
VDQELDINRLSDYDVDHIVPQSFLKDDSIDNKVLTRSDKNRGKSDNVPSE
EVVKKMKNYWRQLLNAKLITQRKFDNLTKAERGGLSELDKAGFIKRQLVE
TRQITKHVAQILDSRMNTKYDENDKLIREVKVITLKSKLVSDFRKDFQFY
KVREINNYHHAHDAYLNAVVGTALIKKYPKLESEFVYGDYKVYDVRKMIA
KSEQEIGKATAKYFFYSNIMNFFKTEITLANGEIRKRPLIETNGETGEIV
WDKGRDFATVRKVLSMPQVNIVKKTEVQTGGFSKESILPKRNSDKLIARK
KDWDPKKYGGFDSPTVAYSVLVVAKVEKGKSKKLKSVKELLGITIMERSS
FEKNPIDFLEAKGYKEVKKDLIIKLPKYSLFELENGRKRMLASAGELQKG
NELALPSKYVNFLYLASHYEKLKGSPEDNEQKQLFVEQHKHYLDEIIEQI
SEFSKRVILADANLDKVLSAYNKHRDKPIREQAENIIHLFTLTNLGAPAA
FKYFDTTIDRKRYTSTKEVLDATLIHQSITGLYETRIDLSQLGGD
115.1 Cas9 TadAins1004
(SEQ ID NO: 177)
MDKKYSIGLAIGTNSVGWAVITDEYKVPSKKFKVLGNTDRHSIKKNLIGA
LLFDSGETAEATRLKRTARRRYTRRKNRICYLQEIFSNEMAKVDDSFFHR
LEESFLVEEDKKHERHPIFGNIVDEVAYHEKYPTIYHLRKKLVDSTDKAD
LRLIYLALAHMIKFRGHFLIEGDLNPDNSDVDKLFIQLVQTYNQLFEENP
INASGVDAKAILSARLSKSRRLENLIAQLPGEKKNGLFGNLIALSLGLTP
NFKSNFDLAEDAKLQLSKDTYDDDLDNLLAQIGDQYADLFLAAKNLSDAI
LLSDILRVNTEITKAPLSASMIKRYDEHHQDLTLLKALVRQQLPEKYKEI
FFDQSKNGYAGYIDGGASQEEFYKFIKPILEKMDGTEELLVKLNREDLLR
KQRTFDNGSIPHQIHLGELHAILRRQEDFYPFLKDNREKIEKILTFRIPY
YVGPLARGNSRFAWMTRKSEETITPWNFEEVVDKGASAQSFIERMTNFDK
NLPNEKVLPKHSLLYEYFTVYNELTKVKYVTEGMRKPAFLSGEQKKAIVD
LLFKTNRKVTVKQLKEDYFKKIECFDSVEISGVEDRFNASLGTYHDLLKI
IKDKDFLDNEENEDILEDIVLTLTLFEDREMIEERLKTYAHLFDDKVMKQ
LKRRRYTGWGRLSRKLINGIRDKQSGKTILDFLKSDGFANRNFMQLIHDD
SLTFKEDIQKAQVSGQGDSLHEHIANLAGSPAIKKGILQTVKVVDELVKV
MGRHKPENIVIEMARENQTTQKGQKNSRERMKRIEEGIKELGSQILKEHP
VENTQLQNEKLYLYYLQNGRDMYVDQELDINRLSDYDVDHIVPQSFLKDD
SIDNKVLTRSDKNRGKSDNVPSEEVVKKMKNYWRQLLNAKLITQRKFDNL
TKAERGGLSELDKAGFIKRQLVETRQITKHVAQILDSRMNTKYDENDKLI
REVKVITLKSKLVSDFRKDFQFYKVREINNYHHAHDAYLNAVVGTALIKK
YPKGSSGSETPGTSESATPESSGSEVEFSHEYWMRHALTLAKRARDEREV
PVGAVLVLNNRVIGEGWNRAIGLHDPTAHAEIMALRQGGLVMQNYRLIDA
TLYVTFEPCVMCAGAMIHSRIGRVVFGVRNAKTGAAGSLMDVLHYPGMNH
RVEITEGILADECAALLCYFFRMPRQLESEFVYGDYKVYDVRKMIAKSEQ
EIGKATAKYFFYSNIMNFFKTEITLANGEIRKRPLIETNGETGEIVWDKG
RDFATVRKVLSMPQVNIVKKTEVQTGGFSKESILPKRNSDKLIARKKDWD
PKKYGGFDSPTVAYSVLVVAKVEKGKSKKLKSVKELLGITIMERSSFEKN
PIDFLEAKGYKEVKKDLIIKLPKYSLFELENGRKRMLASAGELQKGNELA
LPSKYVNFLYLASHYEKLKGSPEDNEQKQLFVEQHKHYLDEIIEQISEFS
KRVILADANLDKVLSAYNKHRDKPIREQAENIIHLFTLTNLGAPAAFKYF
DTTIDRKRYTSTKEVLDATLIHQSITGLYETRIDLSQLGGD
115.2 Cas9 TadAins1005
(SEQ ID NO: 178)
MDKKYSIGLAIGTNSVGWAVITDEYKVPSKKFKVLGNTDRHSIKKNLIGA
LLFDSGETAEATRLKRTARRRYTRRKNRICYLQEIFSNEMAKVDDSFFHR
LEESFLVEEDKKHERHPIFGNIVDEVAYHEKYPTIYHLRKKLVDSTDKAD
LRLIYLALAHMIKFRGHFLIEGDLNPDNSDVDKLFIQLVQTYNQLFEENP
INASGVDAKAILSARLSKSRRLENLIAQLPGEKKNGLFGNLIALSLGLTP
NFKSNFDLAEDAKLQLSKDTYDDDLDNLLAQIGDQYADLFLAAKNLSDAI
LLSDILRVNTEITKAPLSASMIKRYDEHHQDLTLLKALVRQQLPEKYKEI
FFDQSKNGYAGYIDGGASQEEFYKFIKPILEKMDGTEELLVKLNREDLLR
KQRTFDNGSIPHQIHLGELHAILRRQEDFYPFLKDNREKIEKILTFRIPY
YVGPLARGNSRFAWMTRKSEETITPWNFEEVVDKGASAQSFIERMTNFDK
NLPNEKVLPKHSLLYEYFTVYNELTKVKYVTEGMRKPAFLSGEQKKAIVD
LLFKTNRKVTVKQLKEDYFKKIECFDSVEISGVEDRFNASLGTYHDLLKI
IKDKDFLDNEENEDILEDIVLTLTLFEDREMIEERLKTYAHLFDDKVMKQ
LKRRRYTGWGRLSRKLINGIRDKQSGKTILDFLKSDGFANRNFMQLIHDD
SLTFKEDIQKAQVSGQGDSLHEHIANLAGSPAIKKGILQTVKVVDELVKV
MGRHKPENIVIEMARENQTTQKGQKNSRERMKRIEEGIKELGSQILKEHP
VENTQLQNEKLYLYYLQNGRDMYVDQELDINRLSDYDVDHIVPQSFLKDD
SIDNKVLTRSDKNRGKSDNVPSEEVVKKMKNYWRQLLNAKLITQRKFDNL
TKAERGGLSELDKAGFIKRQLVETRQITKHVAQILDSRMNTKYDENDKLI
REVKVITLKSKLVSDFRKDFQFYKVREINNYHHAHDAYLNAVVGTALIKK
YPKLGSSGSETPGTSESATPESSGSEVEFSHEYWMRHALTLAKRARDERE
VPVGAVLVLNNRVIGEGWNRAIGLHDPTAHAEIMALRQGGLVMQNYRLID
ATLYVTFEPCVMCAGAMIHSRIGRVVFGVRNAKTGAAGSLMDVLHYPGMN
HRVEITEGILADECAALLCYFFRMPRQESEFVYGDYKVYDVRKMIAKSEQ
EIGKATAKYFFYSNIMNFFKTEITLANGEIRKRPLIETNGETGEIVWDKG
RDFATVRKVLSMPQVNIVKKTEVQTGGFSKESILPKRNSDKLIARKKDWD
PKKYGGFDSPTVAYSVLVVAKVEKGKSKKLKSVKELLGITIMERSSFEKN
PIDFLEAKGYKEVKKDLIIKLPKYSLFELENGRKRMLASAGELQKGNELA
LPSKYVNFLYLASHYEKLKGSPEDNEQKQLFVEQHKHYLDEIIEQISEFS
KRVILADANLDKVLSAYNKHRDKPIREQAENIIHLFTLTNLGAPAAFKYF
DTTIDRKRYTSTKEVLDATLIHQSITGLYETRIDLSQLGGD
115.3 Cas9 TadAins1006
(SEQ ID NO: 179)
MDKKYSIGLAIGTNSVGWAVITDEYKVPSKKFKVLGNTDRHSIKKNLIGA
LLFDSGETAEATRLKRTARRRYTRRKNRICYLQEIFSNEMAKVDDSFFHR
LEESFLVEEDKKHERHPIFGNIVDEVAYHEKYPTIYHLRKKLVDSTDKAD
LRLIYLALAHMIKFRGHFLIEGDLNPDNSDVDKLFIQLVQTYNQLFEENP
INASGVDAKAILSARLSKSRRLENLIAQLPGEKKNGLFGNLIALSLGLTP
NFKSNFDLAEDAKLQLSKDTYDDDLDNLLAQIGDQYADLFLAAKNLSDAI
LLSDILRVNTEITKAPLSASMIKRYDEHHQDLTLLKALVRQQLPEKYKEI
FFDQSKNGYAGYIDGGASQEEFYKFIKPILEKMDGTEELLVKLNREDLLR
KQRTFDNGSIPHQIHLGELHAILRRQEDFYPFLKDNREKIEKILTFRIPY
YVGPLARGNSRFAWMTRKSEETITPWNFEEVVDKGASAQSFIERMTNFDK
NLPNEKVLPKHSLLYEYFTVYNELTKVKYVTEGMRKPAFLSGEQKKAIVD
LLFKTNRKVTVKQLKEDYFKKIECFDSVEISGVEDRFNASLGTYHDLLKI
IKDKDFLDNEENEDILEDIVLTLTLFEDREMIEERLKTYAHLFDDKVMKQ
LKRRRYTGWGRLSRKLINGIRDKQSGKTILDFLKSDGFANRNFMQLIHDD
SLTFKEDIQKAQVSGQGDSLHEHIANLAGSPAIKKGILQTVKVVDELVKV
MGRHKPENIVIEMARENQTTQKGQKNSRERMKRIEEGIKELGSQILKEHP
VENTQLQNEKLYLYYLQNGRDMYVDQELDINRLSDYDVDHIVPQSFLKDD
SIDNKVLTRSDKNRGKSDNVPSEEVVKKMKNYWRQLLNAKLITQRKFDNL
TKAERGGLSELDKAGFIKRQLVETRQITKHVAQILDSRMNTKYDENDKLI
REVKVITLKSKLVSDFRKDFQFYKVREINNYHHAHDAYLNAVVGTALIKK
YPKLEGSSGSETPGTSESATPESSGSEVEFSHEYWMRHALTLAKRARDER
EVPVGAVLVLNNRVIGEGWNRAIGLHDPTAHAEIMALRQGGLVMQNYRLI
DATLYVTFEPCVMCAGAMIHSRIGRVVFGVRNAKTGAAGSLMDVLHYPGM
NHRVEITEGILADECAALLCYFFRMPRQSEFVYGDYKVYDVRKMIAKSEQ
EIGKATAKYFFYSNIMNFFKTEITLANGEIRKRPLIETNGETGEIVWDKG
RDFATVRKVLSMPQVNIVKKTEVQTGGFSKESILPKRNSDKLIARKKDWD
PKKYGGFDSPTVAYSVLVVAKVEKGKSKKLKSVKELLGITIMERSSFEKN
PIDFLEAKGYKEVKKDLIIKLPKYSLFELENGRKRMLASAGELQKGNELA
LPSKYVNFLYLASHYEKLKGSPEDNEQKQLFVEQHKHYLDEIIEQISEFS
KRVILADANLDKVLSAYNKHRDKPIREQAENIIHLFTLTNLGAPAAFKYF
DTTIDRKRYTSTKEVLDATLIHQSITGLYETRIDLSQLGGD
115.4 Cas9 TadAins1007
(SEQ ID NO: 180)
MDKKYSIGLAIGTNSVGWAVITDEYKVPSKKFKVLGNTDRHSIKKNLIGA
LLFDSGETAEATRLKRTARRRYTRRKNRICYLQEIFSNEMAKVDDSFFHR
LEESFLVEEDKKHERHPIFGNIVDEVAYHEKYPTIYHLRKKLVDSTDKAD
LRLIYLALAHMIKFRGHFLIEGDLNPDNSDVDKLFIQLVQTYNQLFEENP
INASGVDAKAILSARLSKSRRLENLIAQLPGEKKNGLFGNLIALSLGLTP
NFKSNFDLAEDAKLQLSKDTYDDDLDNLLAQIGDQYADLFLAAKNLSDAI
LLSDILRVNTEITKAPLSASMIKRYDEHHQDLTLLKALVRQQLPEKYKEI
FFDQSKNGYAGYIDGGASQEEFYKFIKPILEKMDGTEELLVKLNREDLLR
KQRTFDNGSIPHQIHLGELHAILRRQEDFYPFLKDNREKIEKILTFRIPY
YVGPLARGNSRFAWMTRKSEETITPWNFEEVVDKGASAQSFIERMTNFDK
NLPNEKVLPKHSLLYEYFTVYNELTKVKYVTEGMRKPAFLSGEQKKAIVD
LLFKTNRKVTVKQLKEDYFKKIECFDSVEISGVEDRFNASLGTYHDLLKI
IKDKDFLDNEENEDILEDIVLTLTLFEDREMIEERLKTYAHLFDDKVMKQ
LKRRRYTGWGRLSRKLINGIRDKQSGKTILDFLKSDGFANRNFMQLIHDD
SLTFKEDIQKAQVSGQGDSLHEHIANLAGSPAIKKGILQTVKVVDELVKV
MGRHKPENIVIEMARENQTTQKGQKNSRERMKRIEEGIKELGSQILKEHP
VENTQLQNEKLYLYYLQNGRDMYVDQELDINRLSDYDVDHIVPQSFLKDD
SIDNKVLTRSDKNRGKSDNVPSEEVVKKMKNYWRQLLNAKLITQRKFDNL
TKAERGGLSELDKAGFIKRQLVETRQITKHVAQILDSRMNTKYDENDKLI
REVKVITLKSKLVSDFRKDFQFYKVREINNYHHAHDAYLNAVVGTALIKK
YPKLESGSSGSETPGTSESATPESSGSEVEFSHEYWMRHALTLAKRARDE
REVPVGAVLVLNNRVIGEGWNRAIGLHDPTAHAEIMALRQGGLVMQNYRL
IDATLYVTFEPCVMCAGAMIHSRIGRVVFGVRNAKTGAAGSLMDVLHYPG
MNHRVEITEGILADECAALLCYFFRMPRQEFVYGDYKVYDVRKMIAKSEQ
EIGKATAKYFFYSNIMNFFKTEITLANGEIRKRPLIETNGETGEIVWDKG
RDFATVRKVLSMPQVNIVKKTEVQTGGFSKESILPKRNSDKLIARKKDWD
PKKYGGFDSPTVAYSVLVVAKVEKGKSKKLKSVKELLGITIMERSSFEKN
PIDFLEAKGYKEVKKDLIIKLPKYSLFELENGRKRMLASAGELQKGNELA
LPSKYVNFLYLASHYEKLKGSPEDNEQKQLFVEQHKHYLDEIIEQISEFS
KRVILADANLDKVLSAYNKHRDKPIREQAENIIHLFTLTNLGAPAAFKYF
DTTIDRKRYTSTKEVLDATLIHQSITGLYETRIDLSQLGGD
116.1 Cas9 TadAins C-term truncate2 792
(SEQ ID NO: 181)
MDKKYSIGLAIGTNSVGWAVITDEYKVPSKKFKVLGNTDRHSIKKNLIGA
LLFDSGETAEATRLKRTARRRYTRRKNRICYLQEIFSNEMAKVDDSFFHR
LEESFLVEEDKKHERHPIFGNIVDEVAYHEKYPTIYHLRKKLVDSTDKAD
LRLIYLALAHMIKFRGHFLIEGDLNPDNSDVDKLFIQLVQTYNQLFEENP
INASGVDAKAILSARLSKSRRLENLIAQLPGEKKNGLFGNLIALSLGLTP
NFKSNFDLAEDAKLQLSKDTYDDDLDNLLAQIGDQYADLFLAAKNLSDAI
LLSDILRVNTEITKAPLSASMIKRYDEHHQDLTLLKALVRQQLPEKYKEI
FFDQSKNGYAGYIDGGASQEEFYKFIKPILEKMDGTEELLVKLNREDLLR
KQRTFDNGSIPHQIHLGELHAILRRQEDFYPFLKDNREKIEKILTFRIPY
YVGPLARGNSRFAWMTRKSEETITPWNFEEVVDKGASAQSFIERMTNFDK
NLPNEKVLPKHSLLYEYFTVYNELTKVKYVTEGMRKPAFLSGEQKKAIVD
LLFKTNRKVTVKQLKEDYFKKIECFDSVEISGVEDRFNASLGTYHDLLKI
IKDKDFLDNEENEDILEDIVLTLTLFEDREMIEERLKTYAHLFDDKVMKQ
LKRRRYTGWGRLSRKLINGIRDKQSGKTILDFLKSDGFANRNFMQLIHDD
SLTFKEDIQKAQVSGQGDSLHEHIANLAGSPAIKKGILQTVKVVDELVKV
MGRHKPENIVIEMARENQTTQKGQKNSRERMKRIEEGIKELGGSSGSETP
GTSESATPESSGSEVEFSHEYWMRHALTLAKRARDEREVPVGAVLVLNNR
VIGEGWNRAIGLHDPTAHAEIMALRQGGLVMQNYRLIDATLYVTFEPCVM
CAGAMIHSRIGRVVFGVRNAKTGAAGSLMDVLHYPGMNHRVEITEGILAD
ECAALLCYFFRMPRQSQILKEHPVENTQLQNEKLYLYYLQNGRDMYVDQE
LDINRLSDYDVDHIVPQSFLKDDSIDNKVLTRSDKNRGKSDNVPSEEVVK
KMKNYWRQLLNAKLITQRKFDNLTKAERGGLSELDKAGFIKRQLVETRQI
TKHVAQILDSRMNTKYDENDKLIREVKVITLKSKLVSDFRKDFQFYKVRE
INNYHHAHDAYLNAVVGTALIKKYPKLESEFVYGDYKVYDVRKMIAKSEQ
EIGKATAKYFFYSNIMNFFKTEITLANGEIRKRPLIETNGETGEIVWDKG
RDFATVRKVLSMPQVNIVKKTEVQTGGFSKESILPKRNSDKLIARKKDWD
PKKYGGFDSPTVAYSVLVVAKVEKGKSKKLKSVKELLGITIMERSSFEKN
PIDFLEAKGYKEVKKDLIIKLPKYSLFELENGRKRMLASAGELQKGNELA
LPSKYVNFLYLASHYEKLKGSPEDNEQKQLFVEQHKHYLDEIIEQISEFS
KRVILADANLDKVLSAYNKHRDKPIREQAENIIHLFTLTNLGAPAAFKYF
DTTIDRKRYTSTKEVLDATLIHQSITGLYETRIDLSQLGGD
116.2 Cas9 TadAins C-term truncate2 791
(SEQ ID NO: 182)
MDKKYSIGLAIGTNSVGWAVITDEYKVPSKKFKVLGNTDRHSIKKNLIGA
LLFDSGETAEATRLKRTARRRYTRRKNRICYLQEIFSNEMAKVDDSFFHR
LEESFLVEEDKKHERHPIFGNIVDEVAYHEKYPTIYHLRKKLVDSTDKAD
LRLIYLALAHMIKFRGHFLIEGDLNPDNSDVDKLFIQLVQTYNQLFEENP
INASGVDAKAILSARLSKSRRLENLIAQLPGEKKNGLFGNLIALSLGLTP
NFKSNFDLAEDAKLQLSKDTYDDDLDNLLAQIGDQYADLFLAAKNLSDAI
LLSDILRVNTEITKAPLSASMIKRYDEHHQDLTLLKALVRQQLPEKYKEI
FFDQSKNGYAGYIDGGASQEEFYKFIKPILEKMDGTEELLVKLNREDLLR
KQRTFDNGSIPHQIHLGELHAILRRQEDFYPFLKDNREKIEKILTFRIPY
YVGPLARGNSRFAWMTRKSEETITPWNFEEVVDKGASAQSFIERMTNFDK
NLPNEKVLPKHSLLYEYFTVYNELTKVKYVTEGMRKPAFLSGEQKKAIVD
LLFKTNRKVTVKQLKEDYFKKIECFDSVEISGVEDRFNASLGTYHDLLKI
IKDKDFLDNEENEDILEDIVLTLTLFEDREMIEERLKTYAHLFDDKVMKQ
LKRRRYTGWGRLSRKLINGIRDKQSGKTILDFLKSDGFANRNFMQLIHDD
SLTFKEDIQKAQVSGQGDSLHEHIANLAGSPAIKKGILQTVKVVDELVKV
MGRHKPENIVIEMARENQTTQKGQKNSRERMKRIEEGIKELGSSGSETPG
TSESATPESSGSEVEFSHEYWMRHALTLAKRARDEREVPVGAVLVLNNRV
IGEGWNRAIGLHDPTAHAEIMALRQGGLVMQNYRLIDATLYVTFEPCVMC
AGAMIHSRIGRVVFGVRNAKTGAAGSLMDVLHYPGMNHRVEITEGILADE
CAALLCYFFRMPRQGSQILKEHPVENTQLQNEKLYLYYLQNGRDMYVDQE
LDINRLSDYDVDHIVPQSFLKDDSIDNKVLTRSDKNRGKSDNVPSEEVVK
KMKNYWRQLLNAKLITQRKFDNLTKAERGGLSELDKAGFIKRQLVETRQI
TKHVAQILDSRMNTKYDENDKLIREVKVITLKSKLVSDFRKDFQFYKVRE
INNYHHAHDAYLNAVVGTALIKKYPKLESEFVYGDYKVYDVRKMIAKSEQ
EIGKATAKYFFYSNIMNFFKTEITLANGEIRKRPLIETNGETGEIVWDKG
RDFATVRKVLSMPQVNIVKKTEVQTGGFSKESILPKRNSDKLIARKKDWD
PKKYGGFDSPTVAYSVLVVAKVEKGKSKKLKSVKELLGITIMERSSFEKN
PIDFLEAKGYKEVKKDLIIKLPKYSLFELENGRKRMLASAGELQKGNELA
LPSKYVNFLYLASHYEKLKGSPEDNEQKQLFVEQHKHYLDEIIEQISEFS
KRVILADANLDKVLSAYNKHRDKPIREQAENIIHLFTLTNLGAPAAFKYF
DTTIDRKRYTSTKEVLDATLIHQSITGLYETRIDLSQLGGD
116.3 Cas9 TadAins C-term truncate2 790
(SEQ ID NO: 183)
MDKKYSIGLAIGTNSVGWAVITDEYKVPSKKFKVLGNTDRHSIKKNLIGA
LLFDSGETAEATRLKRTARRRYTRRKNRICYLQEIFSNEMAKVDDSFFHR
LEESFLVEEDKKHERHPIFGNIVDEVAYHEKYPTIYHLRKKLVDSTDKAD
LRLIYLALAHMIKFRGHFLIEGDLNPDNSDVDKLFIQLVQTYNQLFEENP
INASGVDAKAILSARLSKSRRLENLIAQLPGEKKNGLFGNLIALSLGLTP
NFKSNFDLAEDAKLQLSKDTYDDDLDNLLAQIGDQYADLFLAAKNLSDAI
LLSDILRVNTEITKAPLSASMIKRYDEHHQDLTLLKALVRQQLPEKYKEI
FFDQSKNGYAGYIDGGASQEEFYKFIKPILEKMDGTEELLVKLNREDLLR
KQRTFDNGSIPHQIHLGELHAILRRQEDFYPFLKDNREKIEKILTFRIPY
YVGPLARGNSRFAWMTRKSEETITPWNFEEVVDKGASAQSFIERMTNFDK
NLPNEKVLPKHSLLYEYFTVYNELTKVKYVTEGMRKPAFLSGEQKKAIVD
LLFKTNRKVTVKQLKEDYFKKIECFDSVEISGVEDRFNASLGTYHDLLKI
IKDKDFLDNEENEDILEDIVLTLTLFEDREMIEERLKTYAHLFDDKVMKQ
LKRRRYTGWGRLSRKLINGIRDKQSGKTILDFLKSDGFANRNFMQLIHDD
SLTFKEDIQKAQVSGQGDSLHEHIANLAGSPAIKKGILQTVKVVDELVKV
MGRHKPENIVIEMARENQTTQKGQKNSRERMKRIEEGIKEGSSGSETPGT
SESATPESSGSEVEFSHEYWMRHALTLAKRARDEREVPVGAVLVLNNRVI
GEGWNRAIGLHDPTAHAEIMALRQGGLVMQNYRLIDATLYVTFEPCVMCA
GAMIHSRIGRVVFGVRNAKTGAAGSLMDVLHYPGMNHRVEITEGILADEC
AALLCYFFRMPRQLGSQILKEHPVENTQLQNEKLYLYYLQNGRDMYVDQE
LDINRLSDYDVDHIVPQSFLKDDSIDNKVLTRSDKNRGKSDNVPSEEVVK
KMKNYWRQLLNAKLITQRKFDNLTKAERGGLSELDKAGFIKRQLVETRQI
TKHVAQILDSRMNTKYDENDKLIREVKVITLKSKLVSDFRKDFQFYKVRE
INNYHHAHDAYLNAVVGTALIKKYPKLESEFVYGDYKVYDVRKMIAKSEQ
EIGKATAKYFFYSNIMNFFKTEITLANGEIRKRPLIETNGETGEIVWDKG
RDFATVRKVLSMPQVNIVKKTEVQTGGFSKESILPKRNSDKLIARKKDWD
PKKYGGFDSPTVAYSVLVVAKVEKGKSKKLKSVKELLGITIMERSSFEKN
PIDFLEAKGYKEVKKDLIIKLPKYSLFELENGRKRMLASAGELQKGNELA
LPSKYVNFLYLASHYEKLKGSPEDNEQKQLFVEQHKHYLDEIIEQISEFS
KRVILADANLDKVLSAYNKHRDKPIREQAENIIHLFTLTNLGAPAAFKYF
DTTIDRKRYTSTKEVLDATLIHQSITGLYETRIDLSQLGGD
117 Cas9 delta 1017-1069
(SEQ ID NO: 184)
MDKKYSIGLAIGTNSVGWAVITDEYKVPSKKFKVLGNTDRHSIKKNLIGA
LLFDSGETAEATRLKRTARRRYTRRKNRICYLQEIFSNEMAKVDDSFFHR
LEESFLVEEDKKHERHPIFGNIVDEVAYHEKYPTIYHLRKKLVDSTDKAD
LRLIYLALAHMIKFRGHFLIEGDLNPDNSDVDKLFIQLVQTYNQLFEENP
INASGVDAKAILSARLSKSRRLENLIAQLPGEKKNGLFGNLIALSLGLTP
NFKSNFDLAEDAKLQLSKDTYDDDLDNLLAQIGDQYADLFLAAKNLSDAI
LLSDILRVNTEITKAPLSASMIKRYDEHHQDLTLLKALVRQQLPEKYKEI
FFDQSKNGYAGYIDGGASQEEFYKFIKPILEKMDGTEELLVKLNREDLLR
KQRTFDNGSIPHQIHLGELHAILRRQEDFYPFLKDNREKIEKILTFRIPY
YVGPLARGNSRFAWMTRKSEETITPWNFEEVVDKGASAQSFIERMTNFDK
NLPNEKVLPKHSLLYEYFTVYNELTKVKYVTEGMRKPAFLSGEQKKAIVD
LLFKTNRKVTVKQLKEDYFKKIECFDSVEISGVEDRFNASLGTYHDLLKI
IKDKDFLDNEENEDILEDIVLTLTLFEDREMIEERLKTYAHLFDDKVMKQ
LKRRRYTGWGRLSRKLINGIRDKQSGKTILDFLKSDGFANRNFMQLIHDD
SLTFKEDIQKAQVSGQGDSLHEHIANLAGSPAIKKGILQTVKVVDELVKV
MGRHKPENIVIEMARENQTTQKGQKNSRERMKRIEEGIKELGSQILKEHP
VENTQLQNEKLYLYYLQNGRDMYVDQELDINRLSDYDVDHIVPQSFLKDD
SIDNKVLTRSDKNRGKSDNVPSEEVVKKMKNYWRQLLNAKLITQRKFDNL
TKAERGGLSELDKAGFIKRQLVETRQITKHVAQILDSRMNTKYDENDKLI
REVKVITLKSKLVSDFRKDFQFYKVREINNYHHAHDAYLNAVVGTALIKK
YPKLESEFVYGDYKVYSSGSEVEFSHEYWMRHALTLAKRARDEREVPVGA
VLVLNNRVIGEGWNRAIGLHDPTAHAEIMALRQGGLVMQNYRLIDATLYV
TFEPCVMCAGAMIHSRIGRVVFGVRNAKTGAAGSLMDVLHYPGMNHRVEI
TEGILADECAALLCYFFRMPRQVFNAQKKAQSSTDGEIVWDKGRDFATVR
KVLSMPQVNIVKKTEVQTGGFSKESILPKRNSDKLIARKKDWDPKKYGGF
DSPTVAYSVLVVAKVEKGKSKKLKSVKELLGITIMERSSFEKNPIDFLEA
KGYKEVKKDLIIKLPKYSLFELENGRKRMLASAGELQKGNELALPSKYVN
FLYLASHYEKLKGSPEDNEQKQLFVEQHKHYLDEIIEQISEFSKRVILAD
ANLDKVLSAYNKHRDKPIREQAENIIHLFTLTNLGAPAAFKYFDTTIDRK
RYTSTKEVLDATLIHQSITGLYETRIDLSQLGGD
118 Cas9 TadA-CP116ins 1067
(SEQ ID NO: 185)
MDKKYSIGLAIGTNSVGWAVITDEYKVPSKKFKVLGNTDRHSIKKNLIGA
LLFDSGETAEATRLKRTARRRYTRRKNRICYLQEIFSNEMAKVDDSFFHR
LEESFLVEEDKKHERHPIFGNIVDEVAYHEKYPTIYHLRKKLVDSTDKAD
LRLIYLALAHMIKFRGHFLIEGDLNPDNSDVDKLFIQLVQTYNQLFEENP
INASGVDAKAILSARLSKSRRLENLIAQLPGEKKNGLFGNLIALSLGLTP
NFKSNFDLAEDAKLQLSKDTYDDDLDNLLAQIGDQYADLFLAAKNLSDAI
LLSDILRVNTEITKAPLSASMIKRYDEHHQDLTLLKALVRQQLPEKYKEI
FFDQSKNGYAGYIDGGASQEEFYKFIKPILEKMDGTEELLVKLNREDLLR
KQRTFDNGSIPHQIHLGELHAILRRQEDFYPFLKDNREKIEKILTFRIPY
YVGPLARGNSRFAWMTRKSEETITPWNFEEVVDKGASAQSFIERMTNFDK
NLPNEKVLPKHSLLYEYFTVYNELTKVKYVTEGMRKPAFLSGEQKKAIVD
LLFKTNRKVTVKQLKEDYFKKIECFDSVEISGVEDRFNASLGTYHDLLKI
IKDKDFLDNEENEDILEDIVLTLTLFEDREMIEERLKTYAHLFDDKVMKQ
LKRRRYTGWGRLSRKLINGIRDKQSGKTILDFLKSDGFANRNFMQLIHDD
SLTFKEDIQKAQVSGQGDSLHEHIANLAGSPAIKKGILQTVKVVDELVKV
MGRHKPENIVIEMARENQTTQKGQKNSRERMKRIEEGIKELGSQILKEHP
VENTQLQNEKLYLYYLQNGRDMYVDQELDINRLSDYDVDHIVPQSFLKDD
SIDNKVLTRSDKNRGKSDNVPSEEVVKKMKNYWRQLLNAKLITQRKFDNL
TKAERGGLSELDKAGFIKRQLVETRQITKHVAQILDSRMNTKYDENDKLI
REVKVITLKSKLVSDFRKDFQFYKVREINNYHHAHDAYLNAVVGTALIKK
YPKLESEFVYGDYKVYDVRKMIAKSEQEIGKATAKYFFYSNIMNFFKTEI
TLANGEIRKRPLIETNMNHRVEITEGILADECAALLCYFFRMPRQVFNAQ
KKAQSSTDGSSGSETPGTSESATPESSGSEVEFSHEYWMRHALTLAKRAR
DEREVPVGAVLVLNNRVIGEGWNRAIGLHDPTAHAEIMALRQGGLVMQNY
RLIDATLYVTFEPCVMCAGAMIHSRIGRVVFGVRNAKTGAAGSLMDVLHY
PGGETGEIVWDKGRDFATVRKVLSMPQVNIVKKTEVQTGGFSKESILPKR
NSDKLIARKKDWDPKKYGGFDSPTVAYSVLVVAKVEKGKSKKLKSVKELL
GITIMERSSFEKNPIDFLEAKGYKEVKKDLIIKLPKYSLFELENGRKRML
ASAGELQKGNELALPSKYVNFLYLASHYEKLKGSPEDNEQKQLFVEQHKH
YLDEIIEQISEFSKRVILADANLDKVLSAYNKHRDKPIREQAENIIHLFT
LTNLGAPAAFKYFDTTIDRKRYTSTKEVLDATLIHQSITGLYETRIDLSQ
LGGD
119 Cas9 TadAins 701
(SEQ ID NO: 186)
MDKKYSIGLAIGTNSVGWAVITDEYKVPSKKFKVLGNTDRHSIKKNLIGA
LLFDSGETAEATRLKRTARRRYTRRKNRICYLQEIFSNEMAKVDDSFFHR
LEESFLVEEDKKHERHPIFGNIVDEVAYHEKYPTIYHLRKKLVDSTDKAD
LRLIYLALAHMIKFRGHFLIEGDLNPDNSDVDKLFIQLVQTYNQLFEENP
INASGVDAKAILSARLSKSRRLENLIAQLPGEKKNGLFGNLIALSLGLTP
NFKSNFDLAEDAKLQLSKDTYDDDLDNLLAQIGDQYADLFLAAKNLSDAI
LLSDILRVNTEITKAPLSASMIKRYDEHHQDLTLLKALVRQQLPEKYKEI
FFDQSKNGYAGYIDGGASQEEFYKFIKPILEKMDGTEELLVKLNREDLLR
KQRTFDNGSIPHQIHLGELHAILRRQEDFYPFLKDNREKIEKILTFRIPY
YVGPLARGNSRFAWMTRKSEETITPWNFEEVVDKGASAQSFIERMTNFDK
NLPNEKVLPKHSLLYEYFTVYNELTKVKYVTEGMRKPAFLSGEQKKAIVD
LLFKTNRKVTVKQLKEDYFKKIECFDSVEISGVEDRFNASLGTYHDLLKI
IKDKDFLDNEENEDILEDIVLTLTLFEDREMIEERLKTYAHLFDDKVMKQ
LKRRRYTGWGRLSRKLINGIRDKQSGKTILDFLKSDGFANRNFMQLIHDD
SGSSGSETPGTSESATPESSGSEVEFSHEYWMRHALTLAKRARDEREVPV
GAVLVLNNRVIGEGWNRAIGLHDPTAHAEIMALRQGGLVMQNYRLIDATL
YVTFEPCVMCAGAMIHSRIGRVVFGVRNAKTGAAGSLMDVLHYPGMNHRV
EITEGILADECAALLCYFFRMPRQVFNAQKKAQSSTDLTFKEDIQKAQVS
GQGDSLHEHIANLAGSPAIKKGILQTVKVVDELVKVMGRHKPENIVIEMA
RENQTTQKGQKNSRERMKRIEEGIKELGSQILKEHPVENTQLQNEKLYLY
YLQNGRDMYVDQELDINRLSDYDVDHIVPQSFLKDDSIDNKVLTRSDKNR
GKSDNVPSEEVVKKMKNYWRQLLNAKLITQRKFDNLTKAERGGLSELDKA
GFIKRQLVETRQITKHVAQILDSRMNTKYDENDKLIREVKVITLKSKLVS
DFRKDFQFYKVREINNYHHAHDAYLNAVVGTALIKKYPKLESEFVYGDYK
VYDVRKMIAKSEQEIGKATAKYFFYSNIMNFFKTEITLANGEIRKRPLIE
TNGETGEIVWDKGRDFATVRKVLSMPQVNIVKKTEVQTGGFSKESILPKR
NSDKLIARKKDWDPKKYGGFDSPTVAYSVLVVAKVEKGKSKKLKSVKELL
GITIMERSSFEKNPIDFLEAKGYKEVKKDLIIKLPKYSLFELENGRKRML
ASAGELQKGNELALPSKYVNFLYLASHYEKLKGSPEDNEQKQLFVEQHKH
YLDEIIEQISEFSKRVILADANLDKVLSAYNKHRDKPIREQAENIIHLFT
LTNLGAPAAFKYFDTTIDRKRYTSTKEVLDATLIHQSITGLYETRIDLSQ
LGGD
120 Cas9 TadACP136ins 1248
(SEQ ID NO: 187)
MDKKYSIGLAIGTNSVGWAVITDEYKVPSKKFKVLGNTDRHSIKKNLIGA
LLFDSGETAEATRLKRTARRRYTRRKNRICYLQEIFSNEMAKVDDSFFHR
LEESFLVEEDKKHERHPIFGNIVDEVAYHEKYPTIYHLRKKLVDSTDKAD
LRLIYLALAHMIKFRGHFLIEGDLNPDNSDVDKLFIQLVQTYNQLFEENP
INASGVDAKAILSARLSKSRRLENLIAQLPGEKKNGLFGNLIALSLGLTP
NFKSNFDLAEDAKLQLSKDTYDDDLDNLLAQIGDQYADLFLAAKNLSDAI
LLSDILRVNTEITKAPLSASMIKRYDEHHQDLTLLKALVRQQLPEKYKEI
FFDQSKNGYAGYIDGGASQEEFYKFIKPILEKMDGTEELLVKLNREDLLR
KQRTFDNGSIPHQIHLGELHAILRRQEDFYPFLKDNREKIEKILTFRIPY
YVGPLARGNSRFAWMTRKSEETITPWNFEEVVDKGASAQSFIERMTNFDK
NLPNEKVLPKHSLLYEYFTVYNELTKVKYVTEGMRKPAFLSGEQKKAIVD
LLFKTNRKVTVKQLKEDYFKKIECFDSVEISGVEDRFNASLGTYHDLLKI
IKDKDFLDNEENEDILEDIVLTLTLFEDREMIEERLKTYAHLFDDKVMKQ
LKRRRYTGWGRLSRKLINGIRDKQSGKTILDFLKSDGFANRNFMQLIHDD
SLTFKEDIQKAQVSGQGDSLHEHIANLAGSPAIKKGILQTVKVVDELVKV
MGRHKPENIVIEMARENQTTQKGQKNSRERMKRIEEGIKELGSQILKEHP
VENTQLQNEKLYLYYLQNGRDMYVDQELDINRLSDYDVDHIVPQSFLKDD
SIDNKVLTRSDKNRGKSDNVPSEEVVKKMKNYWRQLLNAKLITQRKFDNL
TKAERGGLSELDKAGFIKRQLVETRQITKHVAQILDSRMNTKYDENDKLI
REVKVITLKSKLVSDFRKDFQFYKVREINNYHHAHDAYLNAVVGTALIKK
YPKLESEFVYGDYKVYDVRKMIAKSEQEIGKATAKYFFYSNIMNFFKTEI
TLANGEIRKRPLIETNGETGEIVWDKGRDFATVRKVLSMPQVNIVKKTEV
QTGGFSKESILPKRNSDKLIARKKDWDPKKYGGFDSPTVAYSVLVVAKVE
KGKSKKLKSVKELLGITIMERSSFEKNPIDFLEAKGYKEVKKDLIIKLPK
YSLFELENGRKRMLASAGELQKGNELALPSKYVNFLYLASHYEKLKGSMN
HRVEITEGILADECAALLCYFFRMPRQVFNAQKKAQSSTDGSSGSETPGT
SESATPESSGSEVEFSHEYWMRHALTLAKRARDEREVPVGAVLVLNNRVI
GEGWNRAIGLHDPTAHAEIMALRQGGLVMQNYRLIDATLYVTFEPCVMCA
GAMIHSRIGRVVFGVRNAKTGAAGSLMDVLHYPGPEDNEQKQLFVEQHKH
YLDEIIEQISEFSKRVILADANLDKVLSAYNKHRDKPIREQAENIIHLFT
LTNLGAPAAFKYFDTTIDRKRYTSTKEVLDATLIHQSITGLYETRIDLSQ
LGGD
121 Cas9 TadACP136ins 1052
(SEQ ID NO: 188)
MDKKYSIGLAIGTNSVGWAVITDEYKVPSKKFKVLGNTDRHSIKKNLIGA
LLFDSGETAEATRLKRTARRRYTRRKNRICYLQEIFSNEMAKVDDSFFHR
LEESFLVEEDKKHERHPIFGNIVDEVAYHEKYPTIYHLRKKLVDSTDKAD
LRLIYLALAHMIKFRGHFLIEGDLNPDNSDVDKLFIQLVQTYNQLFEENP
INASGVDAKAILSARLSKSRRLENLIAQLPGEKKNGLFGNLIALSLGLTP
NFKSNFDLAEDAKLQLSKDTYDDDLDNLLAQIGDQYADLFLAAKNLSDAI
LLSDILRVNTEITKAPLSASMIKRYDEHHQDLTLLKALVRQQLPEKYKEI
FFDQSKNGYAGYIDGGASQEEFYKFIKPILEKMDGTEELLVKLNREDLLR
KQRTFDNGSIPHQIHLGELHAILRRQEDFYPFLKDNREKIEKILTFRIPY
YVGPLARGNSRFAWMTRKSEETITPWNFEEVVDKGASAQSFIERMTNFDK
NLPNEKVLPKHSLLYEYFTVYNELTKVKYVTEGMRKPAFLSGEQKKAIVD
LLFKTNRKVTVKQLKEDYFKKIECFDSVEISGVEDRFNASLGTYHDLLKI
IKDKDFLDNEENEDILEDIVLTLTLFEDREMIEERLKTYAHLFDDKVMKQ
LKRRRYTGWGRLSRKLINGIRDKQSGKTILDFLKSDGFANRNFMQLIHDD
SLTFKEDIQKAQVSGQGDSLHEHIANLAGSPAIKKGILQTVKVVDELVKV
MGRHKPENIVIEMARENQTTQKGQKNSRERMKRIEEGIKELGSQILKEHP
VENTQLQNEKLYLYYLQNGRDMYVDQELDINRLSDYDVDHIVPQSFLKDD
SIDNKVLTRSDKNRGKSDNVPSEEVVKKMKNYWRQLLNAKLITQRKFDNL
TKAERGGLSELDKAGFIKRQLVETRQITKHVAQILDSRMNTKYDENDKLI
REVKVITLKSKLVSDFRKDFQFYKVREINNYHHAHDAYLNAVVGTALIKK
YPKLESEFVYGDYKVYDVRKMIAKSEQEIGKATAKYFFYSNIMNFFKTEI
TLAMNHRVEITEGILADECAALLCYFFRMPRQVFNAQKKAQSSTDGSSGS
ETPGTSESATPESSGSEVEFSHEYWMRHALTLAKRARDEREVPVGAVLVL
NNRVIGEGWNRAIGLHDPTAHAEIMALRQGGLVMQNYRLIDATLYVTFEP
CVMCAGAMIHSRIGRVVFGVRNAKTGAAGSLMDVLHYPGNGEIRKRPLIE
TNGETGEIVWDKGRDFATVRKVLSMPQVNIVKKTEVQTGGFSKESILPKR
NSDKLIARKKDWDPKKYGGFDSPTVAYSVLVVAKVEKGKSKKLKSVKELL
GITIMERSSFEKNPIDFLEAKGYKEVKKDLIIKLPKYSLFELENGRKRML
ASAGELQKGNELALPSKYVNFLYLASHYEKLKGSPEDNEQKQLFVEQHKH
YLDEIIEQISEFSKRVILADANLDKVLSAYNKHRDKPIREQAENIIHLFT
LTNLGAPAAFKYFDTTIDRKRYTSTKEVLDATLIHQSITGLYETRIDLSQ
LGGD
122 Cas9 TadACP136ins 1041
(SEQ ID NO: 189)
MDKKYSIGLAIGTNSVGWAVITDEYKVPSKKFKVLGNTDRHSIKKNLIGA
LLFDSGETAEATRLKRTARRRYTRRKNRICYLQEIFSNEMAKVDDSFFHR
LEESFLVEEDKKHERHPIFGNIVDEVAYHEKYPTIYHLRKKLVDSTDKAD
LRLIYLALAHMIKFRGHFLIEGDLNPDNSDVDKLFIQLVQTYNQLFEENP
INASGVDAKAILSARLSKSRRLENLIAQLPGEKKNGLFGNLIALSLGLTP
NFKSNFDLAEDAKLQLSKDTYDDDLDNLLAQIGDQYADLFLAAKNLSDAI
LLSDILRVNTEITKAPLSASMIKRYDEHHQDLTLLKALVRQQLPEKYKEI
FFDQSKNGYAGYIDGGASQEEFYKFIKPILEKMDGTEELLVKLNREDLLR
KQRTFDNGSIPHQIHLGELHAILRRQEDFYPFLKDNREKIEKILTFRIPY
YVGPLARGNSRFAWMTRKSEETITPWNFEEVVDKGASAQSFIERMTNFDK
NLPNEKVLPKHSLLYEYFTVYNELTKVKYVTEGMRKPAFLSGEQKKAIVD
LLFKTNRKVTVKQLKEDYFKKIECFDSVEISGVEDRFNASLGTYHDLLKI
IKDKDFLDNEENEDILEDIVLTLTLFEDREMIEERLKTYAHLFDDKVMKQ
LKRRRYTGWGRLSRKLINGIRDKQSGKTILDFLKSDGFANRNFMQLIHDD
SLTFKEDIQKAQVSGQGDSLHEHIANLAGSPAIKKGILQTVKVVDELVKV
MGRHKPENIVIEMARENQTTQKGQKNSRERMKRIEEGIKELGSQILKEHP
VENTQLQNEKLYLYYLQNGRDMYVDQELDINRLSDYDVDHIVPQSFLKDD
SIDNKVLTRSDKNRGKSDNVPSEEVVKKMKNYWRQLLNAKLITQRKFDNL
TKAERGGLSELDKAGFIKRQLVETRQITKHVAQILDSRMNTKYDENDKLI
REVKVITLKSKLVSDFRKDFQFYKVREINNYHHAHDAYLNAVVGTALIKK
YPKLESEFVYGDYKVYDVRKMIAKSEQEIGKATAKYFFYSMNHRVEITEG
ILADECAALLCYFFRMPRQVFNAQKKAQSSTDGSSGSETPGTSESATPES
SGSEVEFSHEYWMRHALTLAKRARDEREVPVGAVLVLNNRVIGEGWNRAI
GLHDPTAHAEIMALRQGGLVMQNYRLIDATLYVTFEPCVMCAGAMIHSRI
GRVVFGVRNAKTGAAGSLMDVLHYPGNIMNFFKTEITLANGEIRKRPLIE
TNGETGEIVWDKGRDFATVRKVLSMPQVNIVKKTEVQTGGFSKESILPKR
NSDKLIARKKDWDPKKYGGFDSPTVAYSVLVVAKVEKGKSKKLKSVKELL
GITIMERSSFEKNPIDFLEAKGYKEVKKDLIIKLPKYSLFELENGRKRML
ASAGELQKGNELALPSKYVNFLYLASHYEKLKGSPEDNEQKQLFVEQHKH
YLDEIIEQISEFSKRVILADANLDKVLSAYNKHRDKPIREQAENIIHLFT
LTNLGAPAAFKYFDTTIDRKRYTSTKEVLDATLIHQSITGLYETRIDLSQ
LGGD
123 Cas9 TadACP139ins 1299
(SEQ ID NO: 190)
MDKKYSIGLAIGTNSVGWAVITDEYKVPSKKFKVLGNTDRHSIKKNLIGA
LLFDSGETAEATRLKRTARRRYTRRKNRICYLQEIFSNEMAKVDDSFFHR
LEESFLVEEDKKHERHPIFGNIVDEVAYHEKYPTIYHLRKKLVDSTDKAD
LRLIYLALAHMIKFRGHFLIEGDLNPDNSDVDKLFIQLVQTYNQLFEENP
INASGVDAKAILSARLSKSRRLENLIAQLPGEKKNGLFGNLIALSLGLTP
NFKSNFDLAEDAKLQLSKDTYDDDLDNLLAQIGDQYADLFLAAKNLSDAI
LLSDILRVNTEITKAPLSASMIKRYDEHHQDLTLLKALVRQQLPEKYKEI
FFDQSKNGYAGYIDGGASQEEFYKFIKPILEKMDGTEELLVKLNREDLLR
KQRTFDNGSIPHQIHLGELHAILRRQEDFYPFLKDNREKIEKILTFRIPY
YVGPLARGNSRFAWMTRKSEETITPWNFEEVVDKGASAQSFIERMTNFDK
NLPNEKVLPKHSLLYEYFTVYNELTKVKYVTEGMRKPAFLSGEQKKAIVD
LLFKTNRKVTVKQLKEDYFKKIECFDSVEISGVEDRFNASLGTYHDLLKI
IKDKDFLDNEENEDILEDIVLTLTLFEDREMIEERLKTYAHLFDDKVMKQ
LKRRRYTGWGRLSRKLINGIRDKQSGKTILDFLKSDGFANRNFMQLIHDD
SLTFKEDIQKAQVSGQGDSLHEHIANLAGSPAIKKGILQTVKVVDELVKV
MGRHKPENIVIEMARENQTTQKGQKNSRERMKRIEEGIKELGSQILKEHP
VENTQLQNEKLYLYYLQNGRDMYVDQELDINRLSDYDVDHIVPQSFLKDD
SIDNKVLTRSDKNRGKSDNVPSEEVVKKMKNYWRQLLNAKLITQRKFDNL
TKAERGGLSELDKAGFIKRQLVETRQITKHVAQILDSRMNTKYDENDKLI
REVKVITLKSKLVSDFRKDFQFYKVREINNYHHAHDAYLNAVVGTALIKK
YPKLESEFVYGDYKVYDVRKMIAKSEQEIGKATAKYFFYSNIMNFFKTEI
TLANGEIRKRPLIETNGETGEIVWDKGRDFATVRKVLSMPQVNIVKKTEV
QTGGFSKESILPKRNSDKLIARKKDWDPKKYGGFDSPTVAYSVLVVAKVE
KGKSKKLKSVKELLGITIMERSSFEKNPIDFLEAKGYKEVKKDLIIKLPK
YSLFELENGRKRMLASAGELQKGNELALPSKYVNFLYLASHYEKLKGSPE
DNEQKQLFVEQHKHYLDEIIEQISEFSKRVILADANLDKVLSAYNKHRMN
HRVEITEGILADECAALLCYFFRMPRQVFNAQKKAQSSTDGSSGSETPGT
SESATPESSGSEVEFSHEYWMRHALTLAKRARDEREVPVGAVLVLNNRVI
GEGWNRAIGLHDPTAHAEIMALRQGGLVMQNYRLIDATLYVTFEPCVMCA
GAMIHSRIGRVVFGVRNAKTGAAGSLMDVLHYPGDKPIREQAENIIHLFT
LTNLGAPAAFKYFDTTIDRKRYTSTKEVLDATLIHQSITGLYETRIDLSQ
LGGD
124 Cas9 delta 792-872 TadAins
(SEQ ID NO: 191)
MDKKYSIGLAIGTNSVGWAVITDEYKVPSKKFKVLGNTDRHSIKKNLIGA
LLFDSGETAEATRLKRTARRRYTRRKNRICYLQEIFSNEMAKVDDSFFHR
LEESFLVEEDKKHERHPIFGNIVDEVAYHEKYPTIYHLRKKLVDSTDKAD
LRLIYLALAHMIKFRGHFLIEGDLNPDNSDVDKLFIQLVQTYNQLFEENP
INASGVDAKAILSARLSKSRRLENLIAQLPGEKKNGLFGNLIALSLGLTP
NFKSNFDLAEDAKLQLSKDTYDDDLDNLLAQIGDQYADLFLAAKNLSDAI
LLSDILRVNTEITKAPLSASMIKRYDEHHQDLTLLKALVRQQLPEKYKEI
FFDQSKNGYAGYIDGGASQEEFYKFIKPILEKMDGTEELLVKLNREDLLR
KQRTFDNGSIPHQIHLGELHAILRRQEDFYPFLKDNREKIEKILTFRIPY
YVGPLARGNSRFAWMTRKSEETITPWNFEEVVDKGASAQSFIERMTNFDK
NLPNEKVLPKHSLLYEYFTVYNELTKVKYVTEGMRKPAFLSGEQKKAIVD
LLFKTNRKVTVKQLKEDYFKKIECFDSVEISGVEDRFNASLGTYHDLLKI
IKDKDFLDNEENEDILEDIVLTLTLFEDREMIEERLKTYAHLFDDKVMKQ
LKRRRYTGWGRLSRKLINGIRDKQSGKTILDFLKSDGFANRNFMQLIHDD
SLTFKEDIQKAQVSGQGDSLHEHIANLAGSPAIKKGILQTVKVVDELVKV
MGRHKPENIVIEMARENQTTQKGQKNSRERMKRIEEGIKELGSEVEFSHE
YWMRHALTLAKRARDEREVPVGAVLVLNNRVIGEGWNRAIGLHDPTAHAE
IMALRQGGLVMQNYRLIDATLYVTFEPCVMCAGAMIHSRIGRVVFGVRNA
KTGAAGSLMDVLHYPGMNHRVEITEGILADECAALLCYFFRMPRQVFNAQ
KKAQSSTDEEVVKKMKNYWRQLLNAKLITQRKFDNLTKAERGGLSELDKA
GFIKRQLVETRQITKHVAQILDSRMNTKYDENDKLIREVKVITLKSKLVS
DFRKDFQFYKVREINNYHHAHDAYLNAVVGTALIKKYPKLESEFVYGDYK
VYDVRKMIAKSEQEIGKATAKYFFYSNIMNFFKTEITLANGEIRKRPLIE
TNGETGEIVWDKGRDFATVRKVLSMPQVNIVKKTEVQTGGFSKESILPKR
NSDKLIARKKDWDPKKYGGFDSPTVAYSVLVVAKVEKGKSKKLKSVKELL
GITIMERSSFEKNPIDFLEAKGYKEVKKDLIIKLPKYSLFELENGRKRML
ASAGELQKGNELALPSKYVNFLYLASHYEKLKGSPEDNEQKQLFVEQHKH
YLDEIIEQISEFSKRVILADANLDKVLSAYNKHRDKPIREQAENIIHLFT
LTNLGAPAAFKYFDTTIDRKRYTSTKEVLDATLIHQSITGLYETRIDLSQ
LGGD
125 Cas9 delta 792-906 TadAins
(SEQ ID NO: 192)
MDKKYSIGLAIGTNSVGWAVITDEYKVPSKKFKVLGNTDRHSIKKNLIGA
LLFDSGETAEATRLKRTARRRYTRRKNRICYLQEIFSNEMAKVDDSFFHR
LEESFLVEEDKKHERHPIFGNIVDEVAYHEKYPTIYHLRKKLVDSTDKAD
LRLIYLALAHMIKFRGHFLIEGDLNPDNSDVDKLFIQLVQTYNQLFEENP
INASGVDAKAILSARLSKSRRLENLIAQLPGEKKNGLFGNLIALSLGLTP
NFKSNFDLAEDAKLQLSKDTYDDDLDNLLAQIGDQYADLFLAAKNLSDAI
LLSDILRVNTEITKAPLSASMIKRYDEHHQDLTLLKALVRQQLPEKYKEI
FFDQSKNGYAGYIDGGASQEEFYKFIKPILEKMDGTEELLVKLNREDLLR
KQRTFDNGSIPHQIHLGELHAILRRQEDFYPFLKDNREKIEKILTFRIPY
YVGPLARGNSRFAWMTRKSEETITPWNFEEVVDKGASAQSFIERMTNFDK
NLPNEKVLPKHSLLYEYFTVYNELTKVKYVTEGMRKPAFLSGEQKKAIVD
LLFKTNRKVTVKQLKEDYFKKIECFDSVEISGVEDRFNASLGTYHDLLKI
IKDKDFLDNEENEDILEDIVLTLTLFEDREMIEERLKTYAHLFDDKVMKQ
LKRRRYTGWGRLSRKLINGIRDKQSGKTILDFLKSDGFANRNFMQLIHDD
SLTFKEDIQKAQVSGQGDSLHEHIANLAGSPAIKKGILQTVKVVDELVKV
MGRHKPENIVIEMARENQTTQKGQKNSRERMKRIEEGIKELGSEVEFSHE
YWMRHALTLAKRARDEREVPVGAVLVLNNRVIGEGWNRAIGLHDPTAHAE
IMALRQGGLVMQNYRLIDATLYVTFEPCVMCAGAMIHSRIGRVVFGVRNA
KTGAAGSLMDVLHYPGMNHRVEITEGILADECAALLCYFFRMPRQVFNAQ
KKAQSSTDGLSELDKAGFIKRQLVETRQITKHVAQILDSRMNTKYDENDK
LIREVKVITLKSKLVSDFRKDFQFYKVREINNYHHAHDAYLNAVVGTALI
KKYPKLESEFVYGDYKVYDVRKMIAKSEQEIGKATAKYFFYSNIMNFFKT
EITLANGEIRKRPLIETNGETGEIVWDKGRDFATVRKVLSMPQVNIVKKT
EVQTGGFSKESILPKRNSDKLIARKKDWDPKKYGGFDSPTVAYSVLVVAK
VEKGKSKKLKSVKELLGITIMERSSFEKNPIDFLEAKGYKEVKKDLIIKL
PKYSLFELENGRKRMLASAGELQKGNELALPSKYVNFLYLASHYEKLKGS
PEDNEQKQLFVEQHKHYLDEIIEQISEFSKRVILADANLDKVLSAYNKHR
DKPIREQAENIIHLFTLTNLGAPAAFKYFDTTIDRKRYTSTKEVLDATLI
HQSITGLYETRIDLSQLGGD
126 TadA CP65ins 1003
(SEQ ID NO: 193)
MDKKYSIGLAIGTNSVGWAVITDEYKVPSKKFKVLGNTDRHSIKKNLIGA
LLFDSGETAEATRLKRTARRRYTRRKNRICYLQEIFSNEMAKVDDSFFHR
LEESFLVEEDKKHERHPIFGNIVDEVAYHEKYPTIYHLRKKLVDSTDKAD
LRLIYLALAHMIKFRGHFLIEGDLNPDNSDVDKLFIQLVQTYNQLFEENP
INASGVDAKAILSARLSKSRRLENLIAQLPGEKKNGLFGNLIALSLGLTP
NFKSNFDLAEDAKLQLSKDTYDDDLDNLLAQIGDQYADLFLAAKNLSDAI
LLSDILRVNTEITKAPLSASMIKRYDEHHQDLTLLKALVRQQLPEKYKEI
FFDQSKNGYAGYIDGGASQEEFYKFIKPILEKMDGTEELLVKLNREDLLR
KQRTFDNGSIPHQIHLGELHAILRRQEDFYPFLKDNREKIEKILTFRIPY
YVGPLARGNSRFAWMTRKSEETITPWNFEEVVDKGASAQSFIERMTNFDK
NLPNEKVLPKHSLLYEYFTVYNELTKVKYVTEGMRKPAFLSGEQKKAIVD
LLFKTNRKVTVKQLKEDYFKKIECFDSVEISGVEDRFNASLGTYHDLLKI
IKDKDFLDNEENEDILEDIVLTLTLFEDREMIEERLKTYAHLFDDKVMKQ
LKRRRYTGWGRLSRKLINGIRDKQSGKTILDFLKSDGFANRNFMQLIHDD
SLTFKEDIQKAQVSGQGDSLHEHIANLAGSPAIKKGILQTVKVVDELVKV
MGRHKPENIVIEMARENQTTQKGQKNSRERMKRIEEGIKELGSQILKEHP
VENTQLQNEKLYLYYLQNGRDMYVDQELDINRLSDYDVDHIVPQSFLKDD
SIDNKVLTRSDKNRGKSDNVPSEEVVKKMKNYWRQLLNAKLITQRKFDNL
TKAERGGLSELDKAGFIKRQLVETRQITKHVAQILDSRMNTKYDENDKLI
REVKVITLKSKLVSDFRKDFQFYKVREINNYHHAHDAYLNAVVGTALIKK
YPKTAHAEIMALRQGGLVMQNYRLIDATLYVTFEPCVMCAGAMIHSRIGR
VVFGVRNAKTGAAGSLMDVLHYPGMNHRVEITEGILADECAALLCYFFRM
PRQVFNAQKKAQSSTDGSSGSETPGTSESATPESSGSEVEFSHEYWMRHA
LTLAKRARDEREVPVGAVLVLNNRVIGEGWNRAIGLHDPLESEFVYGDYK
VYDVRKMIAKSEQEIGKATAKYFFYSNIMNFFKTEITLANGEIRKRPLIE
TNGETGEIVWDKGRDFATVRKVLSMPQVNIVKKTEVQTGGFSKESILPKR
NSDKLIARKKDWDPKKYGGFDSPTVAYSVLVVAKVEKGKSKKLKSVKELL
GITIMERSSFEKNPIDFLEAKGYKEVKKDLIIKLPKYSLFELENGRKRML
ASAGELQKGNELALPSKYVNFLYLASHYEKLKGSPEDNEQKQLFVEQHKH
YLDEIIEQISEFSKRVILADANLDKVLSAYNKHRDKPIREQAENIIHLFT
LTNLGAPAAFKYFDTTIDRKRYTSTKEVLDATLIHQSITGLYETRIDLSQ
LGGD
127 TadA CP65ins 1016
(SEQ ID NO: 194)
MDKKYSIGLAIGTNSVGWAVITDEYKVPSKKFKVLGNTDRHSIKKNLIGA
LLFDSGETAEATRLKRTARRRYTRRKNRICYLQEIFSNEMAKVDDSFFHR
LEESFLVEEDKKHERHPIFGNIVDEVAYHEKYPTIYHLRKKLVDSTDKAD
LRLIYLALAHMIKFRGHFLIEGDLNPDNSDVDKLFIQLVQTYNQLFEENP
INASGVDAKAILSARLSKSRRLENLIAQLPGEKKNGLFGNLIALSLGLTP
NFKSNFDLAEDAKLQLSKDTYDDDLDNLLAQIGDQYADLFLAAKNLSDAI
LLSDILRVNTEITKAPLSASMIKRYDEHHQDLTLLKALVRQQLPEKYKEI
FFDQSKNGYAGYIDGGASQEEFYKFIKPILEKMDGTEELLVKLNREDLLR
KQRTFDNGSIPHQIHLGELHAILRRQEDFYPFLKDNREKIEKILTFRIPY
YVGPLARGNSRFAWMTRKSEETITPWNFEEVVDKGASAQSFIERMTNFDK
NLPNEKVLPKHSLLYEYFTVYNELTKVKYVTEGMRKPAFLSGEQKKAIVD
LLFKTNRKVTVKQLKEDYFKKIECFDSVEISGVEDRFNASLGTYHDLLKI
IKDKDFLDNEENEDILEDIVLTLTLFEDREMIEERLKTYAHLFDDKVMKQ
LKRRRYTGWGRLSRKLINGIRDKQSGKTILDFLKSDGFANRNFMQLIHDD
SLTFKEDIQKAQVSGQGDSLHEHIANLAGSPAIKKGILQTVKVVDELVKV
MGRHKPENIVIEMARENQTTQKGQKNSRERMKRIEEGIKELGSQILKEHP
VENTQLQNEKLYLYYLQNGRDMYVDQELDINRLSDYDVDHIVPQSFLKDD
SIDNKVLTRSDKNRGKSDNVPSEEVVKKMKNYWRQLLNAKLITQRKFDNL
TKAERGGLSELDKAGFIKRQLVETRQITKHVAQILDSRMNTKYDENDKLI
REVKVITLKSKLVSDFRKDFQFYKVREINNYHHAHDAYLNAVVGTALIKK
YPKLESEFVYGDYKVTAHAEIMALRQGGLVMQNYRLIDATLYVTFEPCVM
CAGAMIHSRIGRVVFGVRNAKTGAAGSLMDVLHYPGMNHRVEITEGILAD
ECAALLCYFFRMPRQVFNAQKKAQSSTDGSSGSETPGTSESATPESSGSE
VEFSHEYWMRHALTLAKRARDEREVPVGAVLVLNNRVIGEGWNRAIGLHD
PYDVRKMIAKSEQEIGKATAKYFFYSNIMNFFKTEITLANGEIRKRPLIE
TNGETGEIVWDKGRDFATVRKVLSMPQVNIVKKTEVQTGGFSKESILPKR
NSDKLIARKKDWDPKKYGGFDSPTVAYSVLVVAKVEKGKSKKLKSVKELL
GITIMERSSFEKNPIDFLEAKGYKEVKKDLIIKLPKYSLFELENGRKRML
ASAGELQKGNELALPSKYVNFLYLASHYEKLKGSPEDNEQKQLFVEQHKH
YLDEIIEQISEFSKRVILADANLDKVLSAYNKHRDKPIREQAENIIHLFT
LTNLGAPAAFKYFDTTIDRKRYTSTKEVLDATLIHQSITGLYETRIDLSQ
LGGD
128 TadA CP65ins 1022
(SEQ ID NO: 195)
MDKKYSIGLAIGTNSVGWAVITDEYKVPSKKFKVLGNTDRHSIKKNLIGA
LLFDSGETAEATRLKRTARRRYTRRKNRICYLQEIFSNEMAKVDDSFFHR
LEESFLVEEDKKHERHPIFGNIVDEVAYHEKYPTIYHLRKKLVDSTDKAD
LRLIYLALAHMIKFRGHFLIEGDLNPDNSDVDKLFIQLVQTYNQLFEENP
INASGVDAKAILSARLSKSRRLENLIAQLPGEKKNGLFGNLIALSLGLTP
NFKSNFDLAEDAKLQLSKDTYDDDLDNLLAQIGDQYADLFLAAKNLSDAI
LLSDILRVNTEITKAPLSASMIKRYDEHHQDLTLLKALVRQQLPEKYKEI
FFDQSKNGYAGYIDGGASQEEFYKFIKPILEKMDGTEELLVKLNREDLLR
KQRTFDNGSIPHQIHLGELHAILRRQEDFYPFLKDNREKIEKILTFRIPY
YVGPLARGNSRFAWMTRKSEETITPWNFEEVVDKGASAQSFIERMTNFDK
NLPNEKVLPKHSLLYEYFTVYNELTKVKYVTEGMRKPAFLSGEQKKAIVD
LLFKTNRKVTVKQLKEDYFKKIECFDSVEISGVEDRFNASLGTYHDLLKI
IKDKDFLDNEENEDILEDIVLTLTLFEDREMIEERLKTYAHLFDDKVMKQ
LKRRRYTGWGRLSRKLINGIRDKQSGKTILDFLKSDGFANRNFMQLIHDD
SLTFKEDIQKAQVSGQGDSLHEHIANLAGSPAIKKGILQTVKVVDELVKV
MGRHKPENIVIEMARENQTTQKGQKNSRERMKRIEEGIKELGSQILKEHP
VENTQLQNEKLYLYYLQNGRDMYVDQELDINRLSDYDVDHIVPQSFLKDD
SIDNKVLTRSDKNRGKSDNVPSEEVVKKMKNYWRQLLNAKLITQRKFDNL
TKAERGGLSELDKAGFIKRQLVETRQITKHVAQILDSRMNTKYDENDKLI
REVKVITLKSKLVSDFRKDFQFYKVREINNYHHAHDAYLNAVVGTALIKK
YPKLESEFVYGDYKVYDVRKMITAHAEIMALRQGGLVMQNYRLIDATLYV
TFEPCVMCAGAMIHSRIGRVVFGVRNAKTGAAGSLMDVLHYPGMNHRVEI
TEGILADECAALLCYFFRMPRQVFNAQKKAQSSTDGSSGSETPGTSESAT
PESSGSEVEFSHEYWMRHALTLAKRARDEREVPVGAVLVLNNRVIGEGWN
RAIGLHDPAKSEQEIGKATAKYFFYSNIMNFFKTEITLANGEIRKRPLIE
TNGETGEIVWDKGRDFATVRKVLSMPQVNIVKKTEVQTGGFSKESILPKR
NSDKLIARKKDWDPKKYGGFDSPTVAYSVLVVAKVEKGKSKKLKSVKELL
GITIMERSSFEKNPIDFLEAKGYKEVKKDLIIKLPKYSLFELENGRKRML
ASAGELQKGNELALPSKYVNFLYLASHYEKLKGSPEDNEQKQLFVEQHKH
YLDEIIEQISEFSKRVILADANLDKVLSAYNKHRDKPIREQAENIIHLFT
LTNLGAPAAFKYFDTTIDRKRYTSTKEVLDATLIHQSITGLYETRIDLSQ
LGGD
129 TadA CP65ins 1029
(SEQ ID NO: 196)
MDKKYSIGLAIGTNSVGWAVITDEYKVPSKKFKVLGNTDRHSIKKNLIGA
LLFDSGETAEATRLKRTARRRYTRRKNRICYLQEIFSNEMAKVDDSFFHR
LEESFLVEEDKKHERHPIFGNIVDEVAYHEKYPTIYHLRKKLVDSTDKAD
LRLIYLALAHMIKFRGHFLIEGDLNPDNSDVDKLFIQLVQTYNQLFEENP
INASGVDAKAILSARLSKSRRLENLIAQLPGEKKNGLFGNLIALSLGLTP
NFKSNFDLAEDAKLQLSKDTYDDDLDNLLAQIGDQYADLFLAAKNLSDAI
LLSDILRVNTEITKAPLSASMIKRYDEHHQDLTLLKALVRQQLPEKYKEI
FFDQSKNGYAGYIDGGASQEEFYKFIKPILEKMDGTEELLVKLNREDLLR
KQRTFDNGSIPHQIHLGELHAILRRQEDFYPFLKDNREKIEKILTFRIPY
YVGPLARGNSRFAWMTRKSEETITPWNFEEVVDKGASAQSFIERMTNFDK
NLPNEKVLPKHSLLYEYFTVYNELTKVKYVTEGMRKPAFLSGEQKKAIVD
LLFKTNRKVTVKQLKEDYFKKIECFDSVEISGVEDRFNASLGTYHDLLKI
IKDKDFLDNEENEDILEDIVLTLTLFEDREMIEERLKTYAHLFDDKVMKQ
LKRRRYTGWGRLSRKLINGIRDKQSGKTILDFLKSDGFANRNFMQLIHDD
SLTFKEDIQKAQVSGQGDSLHEHIANLAGSPAIKKGILQTVKVVDELVKV
MGRHKPENIVIEMARENQTTQKGQKNSRERMKRIEEGIKELGSQILKEHP
VENTQLQNEKLYLYYLQNGRDMYVDQELDINRLSDYDVDHIVPQSFLKDD
SIDNKVLTRSDKNRGKSDNVPSEEVVKKMKNYWRQLLNAKLITQRKFDNL
TKAERGGLSELDKAGFIKRQLVETRQITKHVAQILDSRMNTKYDENDKLI
REVKVITLKSKLVSDFRKDFQFYKVREINNYHHAHDAYLNAVVGTALIKK
YPKLESEFVYGDYKVYDVRKMIAKSEQEITAHAEIMALRQGGLVMQNYRL
IDATLYVTFEPCVMCAGAMIHSRIGRVVFGVRNAKTGAAGSLMDVLHYPG
MNHRVEITEGILADECAALLCYFFRMPRQVFNAQKKAQSSTDGSSGSETP
GTSESATPESSGSEVEFSHEYWMRHALTLAKRARDEREVPVGAVLVLNNR
VIGEGWNRAIGLHDPGKATAKYFFYSNIMNFFKTEITLANGEIRKRPLIE
TNGETGEIVWDKGRDFATVRKVLSMPQVNIVKKTEVQTGGFSKESILPKR
NSDKLIARKKDWDPKKYGGFDSPTVAYSVLVVAKVEKGKSKKLKSVKELL
GITIMERSSFEKNPIDFLEAKGYKEVKKDLIIKLPKYSLFELENGRKRML
ASAGELQKGNELALPSKYVNFLYLASHYEKLKGSPEDNEQKQLFVEQHKH
YLDEIIEQISEFSKRVILADANLDKVLSAYNKHRDKPIREQAENIIHLFT
LTNLGAPAAFKYFDTTIDRKRYTSTKEVLDATLIHQSITGLYETRIDLSQ
LGGD
130 TadA CP65ins 1041
(SEQ ID NO: 197)
MDKKYSIGLAIGTNSVGWAVITDEYKVPSKKFKVLGNTDRHSIKKNLIGA
LLFDSGETAEATRLKRTARRRYTRRKNRICYLQEIFSNEMAKVDDSFFHR
LEESFLVEEDKKHERHPIFGNIVDEVAYHEKYPTIYHLRKKLVDSTDKAD
LRLIYLALAHMIKFRGHFLIEGDLNPDNSDVDKLFIQLVQTYNQLFEENP
INASGVDAKAILSARLSKSRRLENLIAQLPGEKKNGLFGNLIALSLGLTP
NFKSNFDLAEDAKLQLSKDTYDDDLDNLLAQIGDQYADLFLAAKNLSDAI
LLSDILRVNTEITKAPLSASMIKRYDEHHQDLTLLKALVRQQLPEKYKEI
FFDQSKNGYAGYIDGGASQEEFYKFIKPILEKMDGTEELLVKLNREDLLR
KQRTFDNGSIPHQIHLGELHAILRRQEDFYPFLKDNREKIEKILTFRIPY
YVGPLARGNSRFAWMTRKSEETITPWNFEEVVDKGASAQSFIERMTNFDK
NLPNEKVLPKHSLLYEYFTVYNELTKVKYVTEGMRKPAFLSGEQKKAIVD
LLFKTNRKVTVKQLKEDYFKKIECFDSVEISGVEDRFNASLGTYHDLLKI
IKDKDFLDNEENEDILEDIVLTLTLFEDREMIEERLKTYAHLFDDKVMKQ
LKRRRYTGWGRLSRKLINGIRDKQSGKTILDFLKSDGFANRNFMQLIHDD
SLTFKEDIQKAQVSGQGDSLHEHIANLAGSPAIKKGILQTVKVVDELVKV
MGRHKPENIVIEMARENQTTQKGQKNSRERMKRIEEGIKELGSQILKEHP
VENTQLQNEKLYLYYLQNGRDMYVDQELDINRLSDYDVDHIVPQSFLKDD
SIDNKVLTRSDKNRGKSDNVPSEEVVKKMKNYWRQLLNAKLITQRKFDNL
TKAERGGLSELDKAGFIKRQLVETRQITKHVAQILDSRMNTKYDENDKLI
REVKVITLKSKLVSDFRKDFQFYKVREINNYHHAHDAYLNAVVGTALIKK
YPKLESEFVYGDYKVYDVRKMIAKSEQEIGKATAKYFFYSTAHAEIMALR
QGGLVMQNYRLIDATLYVTFEPCVMCAGAMIHSRIGRVVFGVRNAKTGAA
GSLMDVLHYPGMNHRVEITEGILADECAALLCYFFRMPRQVFNAQKKAQS
STDGSSGSETPGTSESATPESSGSEVEFSHEYWMRHALTLAKRARDEREV
PVGAVLVLNNRVIGEGWNRAIGLHDPNIMNFFKTEITLANGEIRKRPLIE
TNGETGEIVWDKGRDFATVRKVLSMPQVNIVKKTEVQTGGFSKESILPKR
NSDKLIARKKDWDPKKYGGFDSPTVAYSVLVVAKVEKGKSKKLKSVKELL
GITIMERSSFEKNPIDFLEAKGYKEVKKDLIIKLPKYSLFELENGRKRML
ASAGELQKGNELALPSKYVNFLYLASHYEKLKGSPEDNEQKQLFVEQHKH
YLDEIIEQISEFSKRVILADANLDKVLSAYNKHRDKPIREQAENIIHLFT
LTNLGAPAAFKYFDTTIDRKRYTSTKEVLDATLIHQSITGLYETRIDLSQ
LGGD
131 TadA CP65ins 1054
(SEQ ID NO: 198)
MDKKYSIGLAIGTNSVGWAVITDEYKVPSKKFKVLGNTDRHSIKKNLIGA
LLFDSGETAEATRLKRTARRRYTRRKNRICYLQEIFSNEMAKVDDSFFHR
LEESFLVEEDKKHERHPIFGNIVDEVAYHEKYPTIYHLRKKLVDSTDKAD
LRLIYLALAHMIKFRGHFLIEGDLNPDNSDVDKLFIQLVQTYNQLFEENP
INASGVDAKAILSARLSKSRRLENLIAQLPGEKKNGLFGNLIALSLGLTP
NFKSNFDLAEDAKLQLSKDTYDDDLDNLLAQIGDQYADLFLAAKNLSDAI
LLSDILRVNTEITKAPLSASMIKRYDEHHQDLTLLKALVRQQLPEKYKEI
FFDQSKNGYAGYIDGGASQEEFYKFIKPILEKMDGTEELLVKLNREDLLR
KQRTFDNGSIPHQIHLGELHAILRRQEDFYPFLKDNREKIEKILTFRIPY
YVGPLARGNSRFAWMTRKSEETITPWNFEEVVDKGASAQSFIERMTNFDK
NLPNEKVLPKHSLLYEYFTVYNELTKVKYVTEGMRKPAFLSGEQKKAIVD
LLFKTNRKVTVKQLKEDYFKKIECFDSVEISGVEDRFNASLGTYHDLLKI
IKDKDFLDNEENEDILEDIVLTLTLFEDREMIEERLKTYAHLFDDKVMKQ
LKRRRYTGWGRLSRKLINGIRDKQSGKTILDFLKSDGFANRNFMQLIHDD
SLTFKEDIQKAQVSGQGDSLHEHIANLAGSPAIKKGILQTVKVVDELVKV
MGRHKPENIVIEMARENQTTQKGQKNSRERMKRIEEGIKELGSQILKEHP
VENTQLQNEKLYLYYLQNGRDMYVDQELDINRLSDYDVDHIVPQSFLKDD
SIDNKVLTRSDKNRGKSDNVPSEEVVKKMKNYWRQLLNAKLITQRKFDNL
TKAERGGLSELDKAGFIKRQLVETRQITKHVAQILDSRMNTKYDENDKLI
REVKVITLKSKLVSDFRKDFQFYKVREINNYHHAHDAYLNAVVGTALIKK
YPKLESEFVYGDYKVYDVRKMIAKSEQEIGKATAKYFFYSNIMNFFKTEI
TLANTAHAEIMALRQGGLVMQNYRLIDATLYVTFEPCVMCAGAMIHSRIG
RVVFGVRNAKTGAAGSLMDVLHYPGMNHRVEITEGILADECAALLCYFFR
MPRQVFNAQKKAQSSTDGSSGSETPGTSESATPESSGSEVEFSHEYWMRH
ALTLAKRARDEREVPVGAVLVLNNRVIGEGWNRAIGLHDPGEIRKRPLIE
TNGETGEIVWDKGRDFATVRKVLSMPQVNIVKKTEVQTGGFSKESILPKR
NSDKLIARKKDWDPKKYGGFDSPTVAYSVLVVAKVEKGKSKKLKSVKELL
GITIMERSSFEKNPIDFLEAKGYKEVKKDLIIKLPKYSLFELENGRKRML
ASAGELQKGNELALPSKYVNFLYLASHYEKLKGSPEDNEQKQLFVEQHKH
YLDEIIEQISEFSKRVILADANLDKVLSAYNKHRDKPIREQAENIIHLFT
LTNLGAPAAFKYFDTTIDRKRYTSTKEVLDATLIHQSITGLYETRIDLSQ
LGGD
132 TadA CP65ins 1246
(SEQ ID NO: 199)
MDKKYSIGLAIGTNSVGWAVITDEYKVPSKKFKVLGNTDRHSIKKNLIGA
LLFDSGETAEATRLKRTARRRYTRRKNRICYLQEIFSNEMAKVDDSFFHR
LEESFLVEEDKKHERHPIFGNIVDEVAYHEKYPTIYHLRKKLVDSTDKAD
LRLIYLALAHMIKFRGHFLIEGDLNPDNSDVDKLFIQLVQTYNQLFEENP
INASGVDAKAILSARLSKSRRLENLIAQLPGEKKNGLFGNLIALSLGLTP
NFKSNFDLAEDAKLQLSKDTYDDDLDNLLAQIGDQYADLFLAAKNLSDAI
LLSDILRVNTEITKAPLSASMIKRYDEHHQDLTLLKALVRQQLPEKYKEI
FFDQSKNGYAGYIDGGASQEEFYKFIKPILEKMDGTEELLVKLNREDLLR
KQRTFDNGSIPHQIHLGELHAILRRQEDFYPFLKDNREKIEKILTFRIPY
YVGPLARGNSRFAWMTRKSEETITPWNFEEVVDKGASAQSFIERMTNFDK
NLPNEKVLPKHSLLYEYFTVYNELTKVKYVTEGMRKPAFLSGEQKKAIVD
LLFKTNRKVTVKQLKEDYFKKIECFDSVEISGVEDRFNASLGTYHDLLKI
IKDKDFLDNEENEDILEDIVLTLTLFEDREMIEERLKTYAHLFDDKVMKQ
LKRRRYTGWGRLSRKLINGIRDKQSGKTILDFLKSDGFANRNFMQLIHDD
SLTFKEDIQKAQVSGQGDSLHEHIANLAGSPAIKKGILQTVKVVDELVKV
MGRHKPENIVIEMARENQTTQKGQKNSRERMKRIEEGIKELGSQILKEHP
VENTQLQNEKLYLYYLQNGRDMYVDQELDINRLSDYDVDHIVPQSFLKDD
SIDNKVLTRSDKNRGKSDNVPSEEVVKKMKNYWRQLLNAKLITQRKFDNL
TKAERGGLSELDKAGFIKRQLVETRQITKHVAQILDSRMNTKYDENDKLI
REVKVITLKSKLVSDFRKDFQFYKVREINNYHHAHDAYLNAVVGTALIKK
YPKLESEFVYGDYKVYDVRKMIAKSEQEIGKATAKYFFYSNIMNFFKTEI
TLANGEIRKRPLIETNGETGEIVWDKGRDFATVRKVLSMPQVNIVKKTEV
QTGGFSKESILPKRNSDKLIARKKDWDPKKYGGFDSPTVAYSVLVVAKVE
KGKSKKLKSVKELLGITIMERSSFEKNPIDFLEAKGYKEVKKDLIIKLPK
YSLFELENGRKRMLASAGELQKGNELALPSKYVNFLYLASHYEKLKGTAH
AEIMALRQGGLVMQNYRLIDATLYVTFEPCVMCAGAMIHSRIGRVVFGVR
NAKTGAAGSLMDVLHYPGMNHRVEITEGILADECAALLCYFFRMPRQVFN
AQKKAQSSTDGSSGSETPGTSESATPESSGSEVEFSHEYWMRHALTLAKR
ARDEREVPVGAVLVLNNRVIGEGWNRAIGLHDPSPEDNEQKQLFVEQHKH
YLDEIIEQISEFSKRVILADANLDKVLSAYNKHRDKPIREQAENIIHLFT
LTNLGAPAAFKYFDTTIDRKRYTSTKEVLDATLIHQSITGLYETRIDLSQ
LGGD

[0588] In some embodiments, Accordingly, adenosine deaminase base editors were generated to insert TadA or variants thereof into the Cas9 polypeptide at the identified positions.

[0589] In some embodiments, a synthetic library of adenosine deaminases alleles, e.g., TadA alleles can be utilized to generate an adenosine base editor with modified base editing efficiency and/or specificity. In some embodiments, an adenosine base editor generated from a synthetic library comprises higher base editing efficiency and/or specificity. In some embodiments, an adenosine base editor generated from a synthetic library exhibits increased base editing efficiency, increased base editing specificity, reduced off-target editing, reduced bystander editing, reduced indel formation, and/or reduced spurious editing compared to an adenosine base editor with a wild type TadA. In some embodiments, an adenosine base editor generated from a synthetic library exhibits increased base editing efficiency, increased base editing specificity, reduced off-target editing, reduced bystander editing, reduced indel formation, and/or reduced spurious editing compared to an adenosine base editor with a TadA*7.10. In some embodiments, the synthetic library comprises randomized TadA portion of ABE. In some embodiments, the synthetic library comprises all 20 canonical amino acid substitutions at each position of TadA. In some embodiments, the synthetic library comprises an average frequency of 1-2 nucleotide substitution mutations per library member. In some embodiments, the synthetic library comprises background mutations found in TadA*7.10.

### C to T Editing

[0590] In some embodiments, a base editor disclosed herein comprises a fusion protein comprising a cytidine deaminase capable of deaminating a target cytidine (C) base of a polynucleotide to produce uridine (U), which has the base pairing properties of thymine. In some embodiments, for example, when the polynucleotide is double-stranded (e.g., DNA), the uridine base is substituted with a thymidine base (e.g., by the cellular repair machinery) to give rise to a C:G to a T:A transition. In other embodiments, deamination of a C to U in a nucleic acid by a base editor cannot be accompanied by substitution of the U to a T.

[0591] The deamination of a target C in a polynucleotide to give rise to a U is a non-limiting example of a type of base editing that can be executed by a base editor described herein. In another example, a base editor comprising a cytidine deaminase domain can mediate conversion of a cytidine (C) base to a guanine (G) base. For example, a U of a polynucleotide produced by deamination of a cytidine by a cytidine deaminase domain of a base editor can be excised from the polynucleotide by a base excision repair mechanism (e.g., by a uracil DNA glycosylase (UDG) domain), producing an abasic site. The nucleobase opposite the abasic site can then be substituted (e.g., by base repair machinery) with another base, such as a C, by, for example, a translesion polymerase. Although it is typical for a nucleobase opposite an abasic site to be replaced with a C, other substitutions (e.g., A, G, or T) can also occur.

[0592] Accordingly, in some embodiments a base editor described herein comprises a deamination domain (e.g., cytidine deaminase domain) capable of deaminating a target C to a U in a polynucleotide. Further, as described below, the base editor can comprise additional domains which facilitate conversion of the U resulting from deamination to, in some embodiments, a T or a G. For example, a base editor comprising a cytidine deaminase domain can further comprise a uracil glycosylase inhibitor (UGI) domain to mediate substitution of a U by a T, completing a C-to-T base editing event. In another example, a base editor can incorporate a translesion polymerase to improve the efficiency of C-to-G base editing, since a translesion polymerase can facilitate incorporation of a C opposite an abasic site (i.e., resulting in incorporation of a G at the abasic site and completing the C-to-G base editing event). In some embodiments, the additional domains are internally fused along with the deaminase domain.

[0593] A base editor comprising a cytidine deaminase as a domain can deaminate a target C in any polynucleotide, including DNA, RNA and DNA-RNA hybrids. Typically, a cytidine deaminase catalyzes a C nucleobase that is positioned in the context of a single-stranded portion of a polynucleotide. In some embodiments, the entire polynucleotide comprising a target C can be single-stranded. For example, a cytidine deaminase incorporated into the base editor can deaminate a target C in a single-stranded RNA polynucleotide. In other embodiments, a base editor comprising a cytidine deaminase domain can act on a double-stranded polynucleotide, but the target C can be positioned in a portion of the polynucleotide which at the time of the deamination reaction is in a single-stranded state. For example, in embodiments where the napDNAbp domain comprises a Cas12 domain, several nucleotides can be left unpaired during formation of the Cas12-gRNA-target DNA complex, resulting in formation of a Cas12 “R-loop complex.” These unpaired nucleotides can form a bubble of single-stranded DNA that can serve as a substrate for a single-strand specific nucleotide deaminase enzyme (e.g., a cytidine deaminase).

[0594] In some embodiments, a cytidine deaminase of a base editor can comprise all or a portion of an apolipoprotein B mRNA editing complex (APOBEC) family deaminase. The APOBEC family comprises evolutionarily conserved cytidine deaminases. Members of this family are C-to-U editing enzymes. The N-terminal domain of APOBEC-like proteins is the catalytic domain, while the C-terminal domain is a pseudocatalytic domain. More specifically, the catalytic domain is a zinc dependent cytidine deaminase domain and is important for cytidine deamination. APOBEC family members include APOBEC1, APOBEC2, APOBEC3A, APOBEC3B, APOBEC3C, APOBEC3D (now referred to as “APOBEC3E”), APOBEC3F, APOBEC3G, APOBEC3H, APOBEC4, and Activation-induced (cytidine) deaminase (AID). A number of base editors comprising modified cytidine deaminases are commercially available, including but not limited to SaBE3, SaKKH-BE3, VQR-BE3, EQR-BE3, VRER-BE3, YE1-BE3, EE-BE3, YE2-BE3, and YEE-BE3, which are available from Addgene (plasmids 85169, 85170, 85171, 85172, 85173, 85174, 85175, 85176, 85177). In some embodiments, a deaminase incorporated into a base editor comprises all or a portion of an APOBEC1 deaminase. In some embodiments, a deaminase incorporated into a base editor comprises all or a portion of APOBEC2 deaminase. In some embodiments, a deaminase incorporated into a base editor comprises all or a portion of is an APOBEC3 deaminase. In some embodiments, a deaminase incorporated into a base editor comprises all or a portion of an APOBEC3A deaminase. In some embodiments, a deaminase incorporated into a base editor comprises all or a portion of APOBEC3B deaminase. In some embodiments, a deaminase incorporated into a base editor comprises all or a portion of APOBEC3C deaminase. In some embodiments, a deaminase incorporated into a base editor comprises all or a portion of APOBEC3D deaminase. In some embodiments, a deaminase incorporated into a base editor comprises all or a portion of APOBEC3E deaminase. In some embodiments, a deaminase incorporated into a base editor comprises all or a portion of APOBEC3F deaminase. In some embodiments, a deaminase incorporated into a base editor comprises all or a portion of APOBEC3G deaminase. In some embodiments, a deaminase incorporated into a base editor comprises all or a portion of APOBEC3H deaminase. In some embodiments, a deaminase incorporated into a base editor comprises all or a portion of APOBEC4 deaminase. In some embodiments, a deaminase incorporated into a base editor comprises all or a portion of activation-induced deaminase (AID).

[0595] In some embodiments a deaminase incorporated into a base editor comprises all or a portion of cytidine deaminase 1 (CDA1). It will be appreciated that a base editor can comprise a deaminase from any suitable organism (e.g., a human or a rat). In some embodiments, a deaminase domain of a base editor is from a human, chimpanzee, gorilla, monkey, cow, dog, rat, or mouse. In some embodiments, the deaminase domain of the base editor is derived from rat (e.g., rat APOBEC1). In some embodiments, the deaminase domain of the base editor is human APOBEC1. In some embodiments, the deaminase domain of the base editor is pmCDA1.

[0596] The base sequence and amino acid sequence of PmCDA1 and the base sequence and amino acid sequence of CDS of human AID are shown herein below.

>tr|A5H718|A5H718_PETMA Cytosine deaminase
OS = Petromyzon marinus OX = 7757
PE = 2 SV = 1
(SEQ ID NO: 200)
MTDAEYVRIHEKLDIYTFKKQFFNNKKSVSHRCYV
LFELKRRGERRACFWGYAVNKPQSGTERGIHAEIF
SIRKVEEYLRDNPGQFTINWYSSWSPCADCAEKIL
EWYNQELRGNGHTLKIWACKLYYEKNARNQIGLWN
LRDNGVGLNVMVSEHYQCCRKIFIQSSHNQLNENR
WLEKTLKRAEKRRSELSIMIQVKILHTTKSPAV
>EF094822.1 Petromyzon marinus isolate
PmCDA.21 cytosine deaminase mRNA, complete
cds
(SEQ ID NO: 201)
TGACACGACACAGCCGTGTATATGAGGAAGGGTAG
CTGGATGGGGGGGGGGGGAATACGTTCAGAGAGGA
CATTAGCGAGCGTCTTGTTGGTGGCCTTGAGTCTA
GACACCTGCAGACATGACCGACGCTGAGTACGTGA
GAATCCATGAGAAGTTGGACATCTACACGTTTAAG
AAACAGTTTTTCAACAACAAAAAATCCGTGTCGCA
TAGATGCTACGTTCTCTTTGAATTAAAACGACGGG
GTGAACGTAGAGCGTGTTTTTGGGGCTATGCTGTG
AATAAACCACAGAGCGGGACAGAACGTGGAATTCA
CGCCGAAATCTTTAGCATTAGAAAAGTCGAAGAAT
ACCTGCGCGACAACCCCGGACAATTCACGATAAAT
TGGTACTCATCCTGGAGTCCTTGTGCAGATTGCGC
TGAAAAGATCTTAGAATGGTATAACCAGGAGCTGC
GGGGGAACGGCCACACTTTGAAAATCTGGGCTTGC
AAACTCTATTACGAGAAAAATGCGAGGAATCAAAT
TGGGCTGTGGAACCTCAGAGATAACGGGGTTGGGT
TGAATGTAATGGTAAGTGAACACTACCAATGTTGC
AGGAAAATATTCATCCAATCGTCGCACAATCAATT
GAATGAGAATAGATGGCTTGAGAAGACTTTGAAGC
GAGCTGAAAAACGACGGAGCGAGTTGTCCATTATG
ATTCAGGTAAAAATACTCCACACCACTAAGAGTCC
TGCTGTTTAAGAGGCTATGCGGATGGTTTTC
>tr|Q6QJ80|Q6QJ80_HUMAN Activation-
induced cytidine deaminase
OS = Homo sapiens OX = 9606
GN = AICDA PE = 2 SV = 1
(SEQ ID NO: 202)
MDSLLMNRRKFLYQFKNVRWAKGRRETYLCYWKRR
DSATSFSLDFGYLRNKNGCHVELLFLRYISDWDLD
PGRCYRVTWFTSWSPCYDCARHVADFLRGNPNLSL
RIFTARLYFCEDRKAEPEGLRRLHRAGVQIAIMTF
KAPV
>NG_011588.1:5001-15681 Homo sapiens
activation induced cytidine deaminase
(AICDA),
RefSeqGene (LRG17) on chromosome 12
(SEQ ID NO: 203)
AGAGAACCATCATTAATTGAAGTGAGATTTTTCTG
GCCTGAGACTTGCAGGGAGGCAAGAAGACACTCTG
GACACCACTATGGACAGGTAAAGAGGCAGTCTTCT
CGTGGGTGATTGCACTGGCCTTCCTCTCAGAGCAA
ATCTGAGTAATGAGACTGGTAGCTATCCCTTTCTC
TCATGTAACTGTCTGACTGATAAGATCAGCTTGAT
CAATATGCATATATATTTTTTGATCTGTCTCCTTT
TCTTCTATTCAGATCTTATACGCTGTCAGCCCAAT
TCTTTCTGTTTCAGACTTCTCTTGATTTCCCTCTT
TTTCATGTGGCAAAAGAAGTAGTGCGTACAATGTA
CTGATTCGTCCTGAGATTTGTACCATGGTTGAAAC
TAATTTATGGTAATAATATTAACATAGCAAATCTT
TAGAGACTCAAATCATGAAAAGGTAATAGCAGTAC
TGTACTAAAAACGGTAGTGCTAATTTTCGTAATAA
TTTTGTAAATATTCAACAGTAAAACAACTTGAAGA
CACACTTTCCTAGGGAGGCGTTACTGAAATAATTT
AGCTATAGTAAGAAAATTTGTAATTTTAGAAATGC
CAAGCATTCTAAATTAATTGCTTGAAAGTCACTAT
GATTGTGTCCATTATAAGGAGACAAATTCATTCAA
GCAAGTTATTTAATGTTAAAGGCCCAATTGTTAGG
CAGTTAATGGCACTTTTACTATTAACTAATCTTTC
CATTTGTTCAGACGTAGCTTAACTTACCTCTTAGG
TGTGAATTTGGTTAAGGTCCTCATAATGTCTTTAT
GTGCAGTTTTTGATAGGTTATTGTCATAGAACTTA
TTCTATTCCTACATTTATGATTACTATGGATGTAT
GAGAATAACACCTAATCCTTATACTTTACCTCAAT
TTAACTCCTTTATAAAGAACTTACATTACAGAATA
AAGATTTTTTAAAAATATATTTTTTTGTAGAGACA
GGGTCTTAGCCCAGCCGAGGCTGGTCTCTAAGTCC
TGGCCCAAGCGATCCTCCTGCCTGGGCCTCCTAAA
GTGCTGGAATTATAGACATGAGCCATCACATCCAA
TATACAGAATAAAGATTTTTAATGGAGGATTTAAT
GTTCTTCAGAAAATTTTCTTGAGGTCAGACAATGT
CAAATGTCTCCTCAGTTTACACTGAGATTTTGAAA
ACAAGTCTGAGCTATAGGTCCTTGTGAAGGGTCCA
TTGGAAATACTTGTTCAAAGTAAAATGGAAAGCAA
AGGTAAAATCAGCAGTTGAAATTCAGAGAAAGACA
GAAAAGGAGAAAAGATGAAATTCAACAGGACAGAA
GGGAAATATATTATCATTAAGGAGGACAGTATCTG
TAGAGCTCATTAGTGATGGCAAAATGACTTGGTCA
GGATTATTTTTAACCCGCTTGTTTCTGGTTTGCAC
GGCTGGGGATGCAGCTAGGGTTCTGCCTCAGGGAG
CACAGCTGTCCAGAGCAGCTGTCAGCCTGCAAGCC
TGAAACACTCCCTCGGTAAAGTCCTTCCTACTCAG
GACAGAAATGACGAGAACAGGGAGCTGGAAACAGG
CCCCTAACCAGAGAAGGGAAGTAATGGATCAACAA
AGTTAACTAGCAGGTCAGGATCACGCAATTCATTT
CACTCTGACTGGTAACATGTGACAGAAACAGTGTA
GGCTTATTGTATTTTCATGTAGAGTAGGACCCAAA
AATCCACCCAAAGTCCTTTATCTATGCCACATCCT
TCTTATCTATACTTCCAGGACACTTTTTCTTCCTT
ATGATAAGGCTCTCTCTCTCTCCACACACACACAC
ACACACACACACACACACACACACACACACACAAA
CACACACCCCGCCAACCAAGGTGCATGTAAAAAGA
TGTAGATTCCTCTGCCTTTCTCATCTACACAGCCC
AGGAGGGTAAGTTAATATAAGAGGGATTTATTGGT
AAGAGATGATGCTTAATCTGTTTAACACTGGGCCT
CAAAGAGAGAATTTCTTTTCTTCTGTACTTATTAA
GCACCTATTATGTGTTGAGCTTATATATACAAAGG
GTTATTATATGCTAATATAGTAATAGTAATGGTGG
TTGGTACTATGGTAATTACCATAAAAATTATTATC
CTTTTAAAATAAAGCTAATTATTATTGGATCTTTT
TTAGTATTCATTTTATGTTTTTTATGTTTTTGATT
TTTTAAAAGACAATCTCACCCTGTTACCCAGGCTG
GAGTGCAGTGGTGCAATCATAGCTTTCTGCAGTCT
TGAACTCCTGGGCTCAAGCAATCCTCCTGCCTTGG
CCTCCCAAAGTGTTGGGATACAGTCATGAGCCACT
GCATCTGGCCTAGGATCCATTTAGATTAAAATATG
CATTTTAAATTTTAAAATAATATGGCTAATTTTTA
CCTTATGTAATGTGTATACTGGCAATAAATCTAGT
TTGCTGCCTAAAGTTTAAAGTGCTTTCCAGTAAGC
TTCATGTACGTGAGGGGAGACATTTAAAGTGAAAC
AGACAGCCAGGTGTGGTGGCTCACGCCTGTAATCC
CAGCACTCTGGGAGGCTGAGGTGGGTGGATCGCTT
GAGCCCTGGAGTTCAAGACCAGCCTGAGCAACATG
GCAAAACGCTGTTTCTATAACAAAAATTAGCCGGG
CATGGTGGCATGTGCCTGTGGTCCCAGCTACTAGG
GGGCTGAGGCAGGAGAATCGTTGGAGCCCAGGAGG
TCAAGGCTGCACTGAGCAGTGCTTGCGCCACTGCA
CTCCAGCCTGGGTGACAGGACCAGACCTTGCCTCA
AAAAAATAAGAAGAAAAATTAAAAATAAATGGAAA
CAACTACAAAGAGCTGTTGTCCTAGATGAGCTACT
TAGTTAGGCTGATATTTTGGTATTTAACTTTTAAA
GTCAGGGTCTGTCACCTGCACTACATTATTAAAAT
ATCAATTCTCAATGTATATCCACACAAAGACTGGT
ACGTGAATGTTCATAGTACCTTTATTCACAAAACC
CCAAAGTAGAGACTATCCAAATATCCATCAACAAG
TGAACAAATAAACAAAATGTGCTATATCCATGCAA
TGGAATACCACCCTGCAGTACAAAGAAGCTACTTG
GGGATGAATCCCAAAGTCATGACGCTAAATGAAAG
AGTCAGACATGAAGGAGGAGATAATGTATGCCATA
CGAAATTCTAGAAAATGAAAGTAACTTATAGTTAC
AGAAAGCAAATCAGGGCAGGCATAGAGGCTCACAC
CTGTAATCCCAGCACTTTGAGAGGCCACGTGGGAA
GATTGCTAGAACTCAGGAGTTCAAGACCAGCCTGG
GCAACACAGTGAAACTCCATTCTCCACAAAAATGG
GAAAAAAAGAAAGCAAATCAGTGGTTGTCCTGTGG
GGAGGGGAAGGACTGCAAAGAGGGAAGAAGCTCTG
GTGGGGTGAGGGTGGTGATTCAGGTTCTGTATCCT
GACTGTGGTAGCAGTTTGGGGTGTTTACATCCAAA
AATATTCGTAGAATTATGCATCTTAAATGGGTGGA
GTTTACTGTATGTAAATTATACCTCAATGTAAGAA
AAAATAATGTGTAAGAAAACTTTCAATTCTCTTGC
CAGCAAACGTTATTCAAATTCCTGAGCCCTTTACT
TCGCAAATTCTCTGCACTTCTGCCCCGTACCATTA
GGTGACAGCACTAGCTCCACAAATTGGATAAATGC
ATTTCTGGAAAAGACTAGGGACAAAATCCAGGCAT
CACTTGTGCTTTCATATCAACCATGCTGTACAGCT
TGTGTTGCTGTCTGCAGCTGCAATGGGGACTCTTG
ATTTCTTTAAGGAAACTTGGGTTACCAGAGTATTT
CCACAAATGCTATTCAAATTAGTGCTTATGATATG
CAAGACACTGTGCTAGGAGCCAGAAAACAAAGAGG
AGGAGAAATCAGTCATTATGTGGGAACAACATAGC
AAGATATTTAGATCATTTTGACTAGTTAAAAAAGC
AGCAGAGTACAAAATCACACATGCAATCAGTATAA
TCCAAATCATGTAAATATGTGCCTGTAGAAAGACT
AGAGGAATAAACACAAGAATCTTAACAGTCATTGT
CATTAGACACTAAGTCTAATTATTATTATTAGACA
CTATGATATTTGAGATTTAAAAAATCTTTAATATT
TTAAAATTTAGAGCTCTTCTATTTTTCCATAGTAT
TCAAGTTTGACAATGATCAAGTATTACTCTTTCTT
TTTTTTTTTTTTTTTTTTTTTTTGAGATGGAGTTT
TGGTCTTGTTGCCCATGCTGGAGTGGAATGGCATG
ACCATAGCTCACTGCAACCTCCACCTCCTGGGTTC
AAGCAAAGCTGTCGCCTCAGCCTCCCGGGTAGATG
GGATTACAGGCGCCCACCACCACACTCGGCTAATG
TTTGTATTTTTAGTAGAGATGGGGTTTCACCATGT
TGGCCAGGCTGGTCTCAAACTCCTGACCTCAGAGG
ATCCACCTGCCTCAGCCTCCCAAAGTGCTGGGATT
ACAGATGTAGGCCACTGCGCCCGGCCAAGTATTGC
TCTTATACATTAAAAAACAGGTGTGAGCCACTGCG
CCCAGCCAGGTATTGCTCTTATACATTAAAAAATA
GGCCGGTGCAGTGGCTCACGCCTGTAATCCCAGCA
CTTTGGGAAGCCAAGGCGGGCAGAACACCCGAGGT
CAGGAGTCCAAGGCCAGCCTGGCCAAGATGGTGAA
ACCCCGTCTCTATTAAAAATACAAACATTACCTGG
GCATGATGGTGGGCGCCTGTAATCCCAGCTACTCA
GGAGGCTGAGGCAGGAGGATCCGCGGAGCCTGGCA
GATCTGCCTGAGCCTGGGAGGTTGAGGCTACAGTA
AGCCAAGATCATGCCAGTATACTTCAGCCTGGGCG
ACAAAGTGAGACCGTAACAAAAAAAAAAAAATTTA
AAAAAAGAAATTTAGATCAAGATCCAACTGTAAAA
AGTGGCCTAAACACCACATTAAAGAGTTTGGAGTT
TATTCTGCAGGCAGAAGAGAACCATCAGGGGGTCT
TCAGCATGGGAATGGCATGGTGCACCTGGTTTTTG
TGAGATCATGGTGGTGACAGTGTGGGGAATGTTAT
TTTGGAGGGACTGGAGGCAGACAGACCGGTTAAAA
GGCCAGCACAACAGATAAGGAGGAAGAAGATGAGG
GCTTGGACCGAAGCAGAGAAGAGCAAACAGGGAAG
GTACAAATTCAAGAAATATTGGGGGGTTTGAATCA
ACACATTTAGATGATTAATTAAATATGAGGACTGA
GGAATAAGAAATGAGTCAAGGATGGTTCCAGGCTG
CTAGGCTGCTTACCTGAGGTGGCAAAGTCGGGAGG
AGTGGCAGTTTAGGACAGGGGGCAGTTGAGGAATA
TTGTTTTGATCATTTTGAGTTTGAGGTACAAGTTG
GACACTTAGGTAAAGACTGGAGGGGAAATCTGAAT
ATACAATTATGGGACTGAGGAACAAGTTTATTTTA
TTTTTTGTTTCGTTTTCTTGTTGAAGAACAAATTT
AATTGTAATCCCAAGTCATCAGCATCTAGAAGACA
GTGGCAGGAGGTGACTGTCTTGTGGGTAAGGGTTT
GGGGTCCTTGATGAGTATCTCTCAATTGGCCTTAA
ATATAAGCAGGAAAAGGAGTTTATGATGGATTCCA
GGCTCAGCAGGGCTCAGGAGGGCTCAGGCAGCCAG
CAGAGGAAGTCAGAGCATCTTCTTTGGTTTAGCCC
AAGTAATGACTTCCTTAAAAAGCTGAAGGAAAATC
CAGAGTGACCAGATTATAAACTGTACTCTTGCATT
TTCTCTCCCTCCTCTCACCCACAGCCTCTTGATGA
ACCGGAGGAAGTTTCTTTACCAATTCAAAAATGTC
CGCTGGGCTAAGGGTCGGCGTGAGACCTACCTGTG
CTACGTAGTGAAGAGGCGTGACAGTGCTACATCCT
TTTCACTGGACTTTGGTTATCTTCGCAATAAGGTA
TCAATTAAAGTCGGCTTTGCAAGCAGTTTAATGGT
CAACTGTGAGTGCTTTTAGAGCCACCTGCTGATGG
TATTACTTCCATCCTTTTTTGGCATTTGTGTCTCT
ATCACATTCCTCAAATCCTTTTTTTTATTTCTTTT
TCCATGTCCATGCACCCATATTAGACATGGCCCAA
AATATGTGATTTAATTCCTCCCCAGTAATGCTGGG
CACCCTAATACCACTCCTTCCTTCAGTGCCAAGAA
CAACTGCTCCCAAACTGTTTACCAGCTTTCCTCAG
CATCTGAATTGCCTTTGAGATTAATTAAGCTAAAA
GCATTTTTATATGGGAGAATATTATCAGCTTGTCC
AAGCAAAAATTTTAAATGTGAAAAACAAATTGTGT
CTTAAGCATTTTTGAAAATTAAGGAAGAAGAATTT
GGGAAAAAATTAACGGTGGCTCAATTCTGTCTTCC
AAATGATTTCTTTTCCCTCCTACTCACATGGGTCG
TAGGCCAGTGAATACATTCAACATGGTGATCCCCA
GAAAACTCAGAGAAGCCTCGGCTGATGATTAATTA
AATTGATCTTTCGGCTACCCGAGAGAATTACATTT
CCAAGAGACTTCTTCACCAAAATCCAGATGGGTTT
ACATAAACTTCTGCCCACGGGTATCTCCTCTCTCC
TAACACGCTGTGACGTCTGGGCTTGGTGGAATCTC
AGGGAAGCATCCGTGGGGTGGAAGGTCATCGTCTG
GCTCGTTGTTTGATGGTTATATTACCATGCAATTT
TCTTTGCCTACATTTGTATTGAATACATCCCAATC
TCCTTCCTATTCGGTGACATGACACATTCTATTTC
AGAAGGCTTTGATTTTATCAAGCACTTTCATTTAC
TTCTCATGGCAGTGCCTATTACTTCTCTTACAATA
CCCATCTGTCTGCTTTACCAAAATCTATTTCCCCT
TTTCAGATCCTCCCAAATGGTCCTCATAAACTGTC
CTGCCTCCACCTAGTGGTCCAGGTATATTTCCACA
ATGTTACATCAACAGGCACTTCTAGCCATTTTCCT
TCTCAAAAGGTGCAAAAAGCAACTTCATAAACACA
AATTAAATCTTCGGTGAGGTAGTGTGATGCTGCTT
CCTCCCAACTCAGCGCACTTCGTCTTCCTCATTCC
ACAAAAACCCATAGCCTTCCTTCACTCTGCAGGAC
TAGTGCTGCCAAGGGTTCAGCTCTACCTACTGGTG
TGCTCTTTTGAGCAAGTTGCTTAGCCTCTCTGTAA
CACAAGGACAATAGCTGCAAGCATCCCCAAAGATC
ATTGCAGGAGACAATGACTAAGGCTACCAGAGCCG
CAATAAAAGTCAGTGAATTTTAGCGTGGTCCTCTC
TGTCTCTCCAGAACGGCTGCCACGTGGAATTGCTC
TTCCTCCGCTACATCTCGGACTGGGACCTAGACCC
TGGCCGCTGCTACCGCGTCACCTGGTTCACCTCCT
GGAGCCCCTGCTACGACTGTGCCCGACATGTGGCC
GACTTTCTGCGAGGGAACCCCAACCTCAGTCTGAG
GATCTTCACCGCGCGCCTCTACTTCTGTGAGGACC
GCAAGGCTGAGCCCGAGGGGCTGCGGCGGCTGCAC
CGCGCCGGGGTGCAAATAGCCATCATGACCTTCAA
AGGTGCGAAAGGGCCTTCCGCGCAGGCGCAGTGCA
GCAGCCCGCATTCGGGATTGCGATGCGGAATGAAT
GAGTTAGTGGGGAAGCTCGAGGGGAAGAAGTGGGC
GGGGATTCTGGTTCACCTCTGGAGCCGAAATTAAA
GATTAGAAGCAGAGAAAAGAGTGAATGGCTCAGAG
ACAAGGCCCCGAGGAAATGAGAAAATGGGGCCAGG
GTTGCTTCTTTCCCCTCGATTTGGAACCTGAACTG
TCTTCTACCCCCATATCCCCGCCTTTTTTTCCTTT
TTTTTTTTTTGAAGATTATTTTTACTGCTGGAATA
CTTTTGTAGAAAACCACGAAAGAACTTTCAAAGCC
TGGGAAGGGCTGCATGAAAATTCAGTTCGTCTCTC
CAGACAGCTTCGGCGCATCCTTTTGGTAAGGGGCT
TCCTCGCTTTTTAAATTTTCTTTCTTTCTCTACAG
TCTTTTTTGGAGTTTCGTATATTTCTTATATTTTC
TTATTGTTCAATCACTCTCAGTTTTCATCTGATGA
AAACTTTATTTCTCCTCCACATCAGCTTTTTCTTC
TGCTGTTTCACCATTCAGAGCCCTCTGCTAAGGTT
CCTTTTCCCTCCCTTTTCTTTCTTTTGTTGTTTCA
CATCTTTAAATTTCTGTCTCTCCCCAGGGTTGCGT
TTCCTTCCTGGTCAGAATTCTTTTCTCCTTTTTTT
TTTTTTTTTTTTTTTTTTTTAAACAAACAAACAAA
AAACCCAAAAAAACTCTTTCCCAATTTACTTTCTT
CCAACATGTTACAAAGCCATCCACTCAGTTTAGAA
GACTCTCCGGCCCCACCGACCCCCAACCTCGTTTT
GAAGCCATTCACTCAATTTGCTTCTCTCTTTCTCT
ACAGCCCCTGTATGAGGTTGATGACTTACGAGACG
CATTTCGTACTTTGGGACTTTGATAGCAACTTCCA
GGAATGTCACACACGATGAAATATCTCTGCTGAAG
ACAGTGGATAAAAAACAGTCCTTCAAGTCTTCTCT
GTTTTTATTCTTCAACTCTCACTTTCTTAGAGTTT
ACAGAAAAAATATTTATATACGACTCTTTAAAAAG
ATCTATGTCTTGAAAATAGAGAAGGAACACAGGTC
TGGCCAGGGACGTGCTGCAATTGGTGCAGTTTTGA
ATGCAACATTGTCCCCTACTGGGAATAACAGAACT
GCAGGACCTGGGAGCATCCTAAAGTGTCAACGTTT
TTCTATGACTTTTAGGTAGGATGAGAGCAGAAGGT
AGATCCTAAAAAGCATGGTGAGAGGATCAAATGTT
TTTATATCAACATCCTTTATTATTTGATTCATTTG
AGTTAACAGTGGTGTTAGTGATAGATTTTTCTATT
CTTTTCCCTTGACGTTTACTTTCAAGTAACACAAA
CTCTTCCATCAGGCCATGATCTATAGGACCTCCTA
ATGAGAGTATCTGGGTGATTGTGACCCCAAACCAT
CTCTCCAAAGCATTAATATCCAATCATGCGCTGTA
TGTTTTAATCAGCAGAAGCATGTTTTTATGTTTGT
ACAAAAGAAGATTGTTATGGGTGGGGATGGAGGTA
TAGACCATGCATGGTCACCTTCAAGCTACTTTAAT
AAAGGATCTTAAAATGGGCAGGAGGACTGTGAACA
AGACACCCTAATAATGGGTTGATGTCTGAAGTAGC
AAATCTTCTGGAAACGCAAACTCTTTTAAGGAAGT
CCCTAATTTAGAAACACCCACAAACTTCACATATC
ATAATTAGCAAACAATTGGAAGGAAGTTGCTTGAA
TGTTGGGGAGAGGAAAATCTATTGGCTCTCGTGGG
TCTCTTCATCTCAGAAATGCCAATCAGGTCAAGGT
TTGCTACATTTTGTATGTGTGTGATGCTTCTCCCA
AAGGTATATTAACTATATAAGAGAGTTGTGACAAA
ACAGAATGATAAAGCTGCGAACCGTGGCACACGCT
CATAGTTCTAGCTGCTTGGGAGGTTGAGGAGGGAG
GATGGCTTGAACACAGGTGTTCAAGGCCAGCCTGG
GCAACATAACAAGATCCTGTCTCTCAAAAAAAAAA
AAAAAAAAAAGAAAGAGAGAGGGCCGGGCGTGGTG
GCTCACGCCTGTAATCCCAGCACTTTGGGAGGCCG
AGCCGGGCGGATCACCTGTGGTCAGGAGTTTGAGA
CCAGCCTGGCCAACATGGCAAAACCCCGTCTGTAC
TCAAAATGCAAAAATTAGCCAGGCGTGGTAGCAGG
CACCTGTAATCCCAGCTACTTGGGAGGCTGAGGCA
GGAGAATCGCTTGAACCCAGGAGGTGGAGGTTGCA
GTAAGCTGAGATCGTGCCGTTGCACTCCAGCCTGG
GCGACAAGAGCAAGACTCTGTCTCAGAAAAAAAAA
AAAAAAAGAGAGAGAGAGAGAAAGAGAACAATATT
TGGGAGAGAAGGATGGGGAAGCATTGCAAGGAAAT
TGTGCTTTATCCAACAAAATGTAAGGAGCCAATAA
GGGATCCCTATTTGTCTCTTTTGGTGTCTATTTGT
CCCTAACAACTGTCTTTGACAGTGAGAAAAATATT
CAGAATAACCATATCCCTGTGCCGTTATTACCTAG
CAACCCTTGCAATGAAGATGAGCAGATCCACAGGA
AAACTTGAATGCACAACTGTCTTATTTTAATCTTA
TTGTACATAAGTTTGTAAAAGAGTTAAAAATTGTT
ACTTCATGTATTCATTTATATTTTATATTATTTTG
CGTCTAATGATTTTTTATTAACATGATTTCCTTTT
CTGATATATTGAAATGGAGTCTCAAAGCTTCATAA
ATTTATAACTTTAGAAATGATTCTAATAACAACGT
ATGTAATTGTAACATTGCAGTAATGGTGCTACGAA
GCCATTTCTCTTGATTTTTAGTAAACTTTTATGAC
AGCAAATTTGCTTCTGGCTCACTTTCAATCAGTTA
AATAAATGATAAATAATTTTGGAAGCTGTGAAGAT
AAAATACCAAATAAAATAATATAAAAGTGATTTAT
ATGAAGTTAAAATAAAAAATCAGTATGATGGAATA
AACTTG

[0597] Other cytidine deaminases useful in the methods of the invention are provided below.

rAPOBEC-1 Rattus norvegicus
(SEQ ID NO: 204)
[sequence omitted]
mAPOBEC-1 Mus musculus
(SEQ ID NO: 205)
MSSETGPVAVDPTLRRRIEPHEFEVFFDPRELRKETCLLYEINWGGRHSVWRHTSQNTSN
HVEVNFLEKFTTERYFRPNTRCSITWFLSWSPCGECSRAITEFLSRHPYVTLFIYIARLY
HHTDQRNRQGLRDLISSGVTIQIMTEQEYCYCWRNFVNYPPSNEAYWPRYPHLWVK
LYVLELYCIILGLPPCLKILRRKQPQLTFFTITLQTCHYQRIPPHLLWATGLK
maAPOBEC-1 Mesocricetus auratus
(SEQ ID NO: 206)
MSSETGPVVVDPTLRRRIEPHEFDAFFDQGELRKETCLLYEIRWGGRHNIWRHTGQN
TSRHVEINFIEKFTSERYFYPSTRCSIVWFLSWSPCGECSKAITEFLSGHPNVTLFIYA
ARLYHHTDQRNRQGLRDLISRGVTIRIMTEQEYCYCWRNFVNYPPSNEVYWPRYPNLWMR
LYALELYCIHLGLPPCLKIKRRHQYPLTFFRLNLQSCHYQRIPPHILWATGFI
hAPOBEC-1 Homo sapiens
(SEQ ID NO: 207)
MTSEKGPSTGDPTLRRRIEPWEFDVFYDPRELRKEACLLYEIKWGMSRKIWRSSGKN
TTNHVEVNFIKKFTSERDFHPSMSCSITWFLSWSPCWECSQAIREFLSRHPGVTLVIYV
ARLFWHMDQQNRQGLRDLVNSGVTIQIMRASEYYHCWRNFVNYPPGDEAHWPQYPPLW
MMLYALELHCIILSLPPCLKISRRWQNHLTFFRLHLQNCHYQTIPPHILLATGLIHPSVAWR
ppAPOBEC-1 Pongo pygmaeus
(SEQ ID NO: 208)
MTSEKGPSTGDPTLRRRIESWEFDVFYDPRELRKETCLLYEIKWGMSRKIWRSSGKN
TTNHVEVNFIKKFTSERRFHSSISCSITWFLSWSPCWECSQAIREFLSQHPGVTLVIYV
ARLFWHMDQRNRQGLRDLVNSGVTIQIMRASEYYHCWRNFVNYPPGDEAHWPQYPPLW
MMLYALELHCIILSLPPCLKISRRWQNHLAFFRLHLQNCHYQTIPPHILLATGLIHPSV
TWR
ocAPOBECI Oryctolagus cuniculus
(SEQ ID NO: 209)
MASEKGPSNKDYTLRRRIEPWEFEVFFDPQELRKEACLLYEIKWGASSKTWRSSGKNT
TNHVEVNFLEKLTSEGRLGPSTCCSITWFLSWSPCWECSMAIREFLSQHPGVTLIIFV
ARLFQHMDRRNRQGLKDLVTSGVTVRVMSVSEYCYCWENFVNYPPGKAAQWPRYPPRW
MLMYALELYCIILGLPPCLKISRRHQKQLTFFSLTPQYCHYKMIPPYILLATGLLQPS
VPWR
mdAPOBEC-1 Monodelphis domestica
(SEQ ID NO: 210)
MNSKTGPSVGDATLRRRIKPWEFVAFFNPQELRKETCLLYEIKWGNQNIWRHSNQN
TSQHAEINFMEKFTAERHFNSSVRCSITWFLSWSPCWECSKAIRKFLDHYPNVTLAI
FISRLYWHMDQQHRQGLKELVHSGVTIQIMSYSEYHYCWRNFVDYPQGEEDYWPKYP
YLWIMLYVLELHCIILGLPPCLKISGSHSNQLALFSLDLQDCHYQKIPYNVLVATGL
VQPFVTWR
mAPOBEC-2 Mus musculus
(SEQ ID NO: 211)
MAQKEEAAEAAAPASQNGDDLENLEDPEKLKELIDLPPFEIVTGVRLPVNFFKFQFR
NVEYSSGRNKTFLCYVVEVQSKGGQAQATQGYLEDEHAGAHAEEAFFNTILPAFDP
ALKYNVTWYVSSSPCAACADRILKTLSKTKNLRLLILVSRLFMWEEPEVQAALKKL
KEAGCKLRIMKPQDFEYIWQNFVEQEEGESKAFEPWEDIQENFLYYEEKLADILK
hAPOBEC-2 Homo sapiens
(SEQ ID NO: 212)
MAQKEEAAVATEAASQNGEDLENLDDPEKLKELIELPPFEIVTGERLPANFFKFQFRN
VEYSSGRNKTFLCYVVEAQGKGGQVQASRGYLEDEHAAAHAEEAFFNTILPAFDPALR
YNVTWYVSSSPCAACADRIIKTLSKTKNLRLLILVGRLFMWEEPEIQAALKKLKEAG
CKLRIMKPQDFEYVWQNFVEQEEGESKAFQPWEDIQENFLYYEEKLADILK
ppAPOBEC-2 Pongo pygmaeus
(SEQ ID NO: 213)
MAQKEEAAAATEAASQNGEDLENLDDPEKLKELIELPPFEIVTGERLPANFFKFQFRN
VEYSSGRNKTFLCYVVEAQGKGGQVQASRGYLEDEHAAAHAEEAFFNTILPAFDPALR
YNVTWYVSSSPCAACADRIIKTLSKTKNLRLLILVGRLFMWEELEIQDALKKLKEAG
CKLRIMKPQDFEYVWQNFVEQEEGESKAFQPWEDIQENFLYYEEKLADILK
btAPOBEC-2 Bos Taurus
(SEQ ID NO: 214)
MAQKEEAAAAAEPASQNGEEVENLEDPEKLKELIELPPFEIVTGERLPAHYFKFQFRN
VEYSSGRNKTFLCYVVEAQSKGGQVQASRGYLEDEHATNHAEEAFFNSIMPTFDPALR
YMVTWYVSSSPCAACADRIVKTLNKTKNLRLLILVGRLFMWEEPEIQAALRKLKEA
GCRLRIMKPQDFEYIWQNFVEQEEGESKAFEPWEDIQENFLYYEEKLADILK
mAPOBEC-3 Mus musculus
(SEQ ID NO: 215)
MQPQRLGPRAGMGPFCLGCSHRKCYSPIRNLISQETFKFHFKNLGYAKGRKDTFLCY
EVTRKDCDSPVSLHHGVFKNKDNIHAEICFLYWFHDKVLKVLSPREEFKITWYMSW
SPCFECAEQIVRFLATHHNLSLDIFSSRLYNVQDPETQQNLCRLVQEGAQVAAMDLY
EFKKCWKKFVDNGGRRFRPWKRLLTNFRYQDSKLQEILRPCYISVPSSSSSTLSNICL
TKGLPETRFWVEGRRMDPLSEEEFYSQFYNQRVKHLCYYHRMKPYLCYQLEQFNG
QAPLKGCLLSEKGKQHAEILFLDKIRSMELSQVTITCYLTWSPCPNCAWQLAAFKRD
RPDLILHIYTSRLYFHWKRPFQKGLCSLWQSGILVDVMDLPQFTDCWTNFVNPKRPF
WPWKGLEIISRRTQRRLRRIKESWGLQDLVNDFGNLQLGPPMS
hAPOBEC-3A Homo sapiens
(SEQ ID NO: 216)
MEASPASGPRHLMDPHIFTSNFNNGIGRHKTYLCYEVERLDNGTSVKMDQHRGFLH
NQAKNLLCGFYGRHAELRFLDLVPSLQLDPAQIYRVTWFISWSPCFSWGCAGEVRAF
LQENTHVRLRIFAARIYDYDPLYKEALQMLRDAGAQVSIMTYDEFKHCWDTFVDHQ
GCPFQPWDGLDEHSQALSGRLRAILQNQGN
hAPOBEC-3B Homo sapiens
(SEQ ID NO: 217)
MNPQIRNPMERMYRDTFYDNFENEPILYGRSYTWLCYEVKIKRGRSNLLWDTGVFR
GQVYFKPQYHAEMCFLSWFCGNQLPAYKCFQITWFVSWTPCPDCVAKLAEFLSEHP
NVTLTISAARLYYYWERDYRRALCRLSQAGARVTIMDYEEFAYCWENFVYNEGQQ
FMPWYKFDENYAFLHRTLKEILRYLMDPDTFTFNFNNDPLVLRRRQTYLCYEVERL
DNGTWVLMDQHMGFLCNEAKNLLCGFYGRHAELRFLDLVPSLQLDPAQIYRVTWFI
SWSPCFSWGCAGEVRAFLQENTHVRLRIFAARIYDYDPLYKEALQMLRDAGAQVSI
MTYDEFEYCWDTFVYRQGCPFQPWDGLEEHSQALSGRLRAILQNQGN
hAPOBEC-3C Homo sapiens
(SEQ ID NO: 218)
MNPQIRNPMKAMYPGTFYFQFKNLWEANDRNETWLCFTVEGIKRRSVVSWKTGVF
RNQVDSETHCHAERCFLSWFCDDILSPNTKYQVTWYTSWSPCPDCAGEVAEFLARH
SNVNLTIFTARLYYFQYPCYQEGLRSLSQEGVAVEIMDYEDFKYCWENFVYNDNEPF
KPWKGLKTNFRLLKRRLRESLQ
hAPOBEC-3D Homo sapiens
(SEQ ID NO: 219)
MNPQIRNPMERMYRDTFYDNFENEPILYGRSYTWLCYEVKIKRGRSNLLWDTGVFR
GPVLPKRQSNHRQEVYFRFENHAEMCFLSWFCGNRLPANRRFQITWFVSWNPCLPC
VVKVTKFLAEHPNVTLTISAARLYYYRDRDWRWVLLRLHKAGARVKIMDYEDFAY
CWENFVCNEGQPFMPWYKFDDNYASLHRTLKEILRNPMEAMYPHIFYFHFKNLLKA
CGRNESWLCFTMEVTKHHSAVFRKRGVFRNQVDPETHCHAERCFLSWFCDDILSPN
TNYEVTWYTSWSPCPECAGEVAEFLARHSNVNLTIFTARLCYFWDTDYQEGLCSLS
QEGASVKIMGYKDFVSCWKNFVYSDDEPFKPWKGLQTNFRLLKRRLREILQ
hAPOBEC-3F Homo sapiens
(SEQ ID NO: 220)
MKPHFRNTVERMYRDTFSYNFYNRPILSRRNTVWLCYEVKTKGPSRPRLDAKIFRGQ
VYSQPEHHAEMCFLSWFCGNQLPAYKCFQITWFVSWTPCPDCVAKLAEFLAEHPNV
TLTISAARLYYYWERDYRRALCRLSQAGARVKIMDDEEFAYCWENFVYSEGQPFMP
WYKFDDNYAFLHRTLKEILRNPMEAMYPHIFYFHFKNLRKAYGRNESWLCFTMEV
VKHHSPVSWKRGVFRNQVDPETHCHAERCFLSWFCDDILSPNTNYEVTWYTSWSPC
PECAGEVAEFLARHSNVNLTIFTARLYYFWDTDYQEGLRSLSQEGASVEIMGYKDFK
YCWENFVYNDDEPFKPWKGLKYNFLFLDSKLQEILE
hAP0BEC-3G Homo sapiens
(SEQ ID NO: 221)
MKPHFRNTVERMYRDTFSYNFYNRPILSRRNTVWLCYEVKTKGPSRPPLDAKIFRG
QVYSELKYHPEMRFFHWFSKWRKLHRDQEYEVTWYISWSPCTKCTRDMATFLAEDP
KVTLTIFVARLYYFWDPDYQEALRSLCQKRDGPRATMKIMNYDEFQHCWSKFVYSQ
RELFEPWNNLPKYYILLHIMLGEILRHSMDPPTFTFNFNNEPWVRGRHETYLCYEV
ERMHNDTWVLLNQRRGFLCNQAPHKHGFLEGRHAELCFLDVIPFWKLDLDQDYRVT
CFTSWSPCFSCAQEMAKFISKNKHVSLCIFTARIYDDQGRCQEGLRTLAEAGAKIS
IMTYSEFKHCWDTFVDHQGCPFQPWDGLDEHSQDLSGRLRAILQNQEN
hAPOBEC-4 Homo sapiens
(SEQ ID NO: 222)
MEPIYEEYLANHGTIVKPYYWLSFSLDCSNCPYHIRTGEEARVSLTEFCQIFGFPYGTTF
PQTKHLTFYELKTSSGSLVQKGHASSCTGNYIHPESMLFEMNGYLDSAIYNNDSIRHIIL
YSNNSPCNEANHCCISKMYNFLITYPGITLSIYFSQLYHTEMDFPASAWNREALRSLASL
WPRVVLSPISGGIWHSVLHSFISGVSGSHVFQPILTGRALADRHNAYEINAITGVKPYFT
DVLLQTKRNPNTKAQEALESYPLNNAFPGQFFQMPSGQLQPNLPPDLRAPVVFVLVP
LRDLPPMHMGQNPNKPRNIVRHLNMPQMSFQETKDLGRLPTGRSVEIVEITEQFASS
KEADEKKKKKGKK
mAPOBEC-4 Mus musculus
(SEQ ID NO: 223)
MDSLLMKQKKFLYHFKNVRWAKGRHETYLCYVVKRRDSATSCSLDFGHLRNKSGC
HVELLFLRYISDWDLDPGRCYRVTWFTSWSPCYDCARHVAEFLRWNPNLSLRIFTAR
LYFCEDRKAEPEGLRRLHRAGVQIGIMTFKDYFYCWNTFVENRERTFKAWEGLHEN
SVRLTRQLRRILLPLYEVDDLRDAFRMLGF
rAPOBEC-4 Rattus norvegicus
(SEQ ID NO: 224)
MEPLYEEYLTHSGTIVKPYYWLSVSLNCTNCPYHIRTGEEARVPYTEFHQTFGFPWSTYP
QTKHLTFYELRSSSGNLIQKGLASNCTGSHTHPESMLFERDGYLDSLIFHDSNIRHIILY
SNNSPCDEANHCCISKMYNFLMNYPEVTLSVFFSQLYHTENQFPTSAWNREALRGLASLW
PQVTLSAISGGIWQSILETFVSGISEGLTAVRPFTAGRTLTDRYNAYEINCITEVKPYFT
DALHSWQKENQDQKVWAASENQPLHNTTPAQWQPDMSQDCRTPAVFMLVPYRDLPPIHVN
PSPQKPRTVVRHLNTLQLSASKVKALRKSPSGRPVKKEEARKGSTRSQEAN
ETNKSKWKKQTLFIKSNICHLLEREQKKIGILSSWSV
mfAPOBEC-4 Macaca fascicularis
(SEQ ID NO: 225)
MEPTYEEYLANHGTIVKPYYWLSFSLDCSNCPYHIRTGEEARVSLTEFCQIFGFPYGTTY
PQTKHLTFYELKTSSGSLVQKGHASSCTGNYIHPESMLFEMNGYLDSAIYNNDS1RFIII
LYCNNSPCNEANHCCISKVYNFLITYPG1TLSIYFSQLYHTEMDFPASAWNREALRSLAS
LWPRVVLSPISGGIWHSVLHSFVSGVSGSHVFQPILTGRALTDRYNAYEINAITGVKPFF
TDVLLHTKRNPNTKAQMALESYPLNNAFPGQSFQMTSGIPPDLRAPVVFVLLPLRDLP
PMHMGQDPNKPRNIIRHLNMPQMSFQETKDLERLPTRRSVETVEITERFASSKQAEEE
KTKKKKGKK
hAID Homo sapiens
(SEQ ID NO: 226)
[sequence omitted]
clAID Canis lupus familiaris
(SEQ ID NO: 227)
MDSLLMKQRKFLYHFKNVRWAKGRHETYLCYVVKRRDSATSFSLDFGHLRNKSGC
HVELLFLRYISDWDLDPGRCYRVTWFTSWSPCYDCARHVADFLRGYPNLSLRIFAAR
LYFCEDRKAEPEGLRRLHRAGVQIAIMTFKDYFYCWNTFVENREKTFKAWEGLHEN
SVRLSRQLRRILLPLYEVDDLRDAFRTLGL
btAID Bos Taurus
(SEQ ID NO: 228)
MDSLLKKQRQFLYQFKNVRWAKGRHETYLCYVVKRRDSPTSFSLDFGHLRNKAGC
HVELLFLRYISDWDLDPGRCYRVTWFTSWSPCYDCARHVADFLRGYPNLSLRIFTAR
LYFCDKERKAEPEGLRRLHRAGVQIAIMTFKDYFYCWNTFVENHERTFKAWEGLHE
NSVRLSRQLRRILLPLYEVDDLRDAFRTLGL
mAID Mus musculus
(SEQ ID NO: 229)
[sequence omitted]
pmCDA-1 Petromyzon marinus
(SEQ ID NO: 230)
MAGYECVRVSEKLDFDTFEFQFENLHYATERHRTYVIFDVKPQSAGGRSRRLWGYII
NNPNVCHAELILMSMIDRHLESNPGVYAMTWYMSWSPCANCSSKLNPWLKNLLEE
QGHTLTMHFSRIYDRDREGDHRGLRGLKHVSNSFRMGVVGRAEVKECLAEYVEASR
RTLTWLDTTESMAAKMRRKLFCILVRCAGMRESGIPLHLFTLQTPLLSGRVVWWRV
pmCDA-2 Petromyzon marinus
(SEQ ID NO: 231)
MELREVVDCALASCVRHEPLSRVAFLRCFAAPSQKPRGTVILFYVEGAGRGVTGGH
AVNYNKQGTSIHAEVLLLSAVRAALLRRRRCEDGEEATRGCTLHCYSTYSPCRDCV
EYIQEFGASTGVRVVIHCCRLYELDVNRRRSEAEGVLRSLSRLGRDFRLMGPRDAIA
LLLGGRLANTADGESGASGNAWVTETNVVEPLVDMTGFGDEDLHAQVQRNKQIREAY
ANYASAVSLMLGELHVDPDKFPFLAEFLAQTSVEPSGTPRETRGRPRGASSRGPEI
GRQRPADFERALGAYGLFLHPRIVSREADREEIKRDLIVVMRKHNYQGP
pmCDA-5 Petromyzon marinus
(SEQ ID NO: 232)
MAGDENVRVSEKLDFDTFEFQFENLHYATERHRTYVIFDVKPQSAGGRSRRLWGYI
INNPNVCHAELILMSMIDRHLESNPGVYAMTWYMSWSPCANCSSKLNPWLKNLLEE
QGHTLMMHFSRIYDRDREGDHRGLRGLKHVSNSFRMGVVGRAEVKECLAEYVEAS
RRTLTWLDTTESMAAKMRRKLFCILVRCAGMRESGMPLHLFT
yCD Saccharomyces cerevisiae
(SEQ ID NO: 233)
MVTGGMASKWDQKGMDIAYEEAALGYKEGGVPIGGCLINNKDGSVLGRGHNMRF
QKGSATLHGEISTLENCGRLEGKVYKDTTLYTTLSPCDMCTGAIIMYGIPRCVV
GENVNFKSKGEKYLQTRGHEVVVVDDERCKKIMKQFIDERPQDWFEDIGE
rAPOBEC-1 (delta 177-186)
(SEQ ID NO: 234)
MSSETGPVAVDPTLRRRIEPHEFEVFFDPRELRKETCLLYEINWGGRHSIWRHTSQNT
NKHVEVNFIEKFTTERYFCPNTRCSITWFLSWSPCGECSRAITEFLSRYPHVTLFIYI
ARLYHHADPRNRQGLRDLISSGVTIQIMTEQESGYCWRNFVNYSPSNEAHWPRYPHLW
VRGLPPCLNILRRKQPQLTFFTIALQSCHYQRLPPHILWATGLK
rAPOBEC-1 (delta 202-213)
(SEQ ID NO: 235)
MSSETGPVAVDPTLRRRIEPHEFEVFFDPRELRKETCLLYEINWGGRHSIWRHTSQNT
NKHVEVNFIEKFTTERYFCPNTRCSITWFLSWSPCGECSRAITEFLSRYPHVTLFIYI
ARLYHHADPRNRQGLRDLISSGVTIQIMTEQESGYCWRNFVNYSPSNEAHWPRYPHLW
VRLYVLELYCIILGLPPCLNILRRKQPQHYQRLPPHILWATGLK
Human AID:
(SEQ ID NO: 226)
[sequence omitted]
(underline: nuclear localization sequence;
double underline: nuclear export signal)
Mouse AID:
(SEQ ID NO: 223)
MDSLLMKQKKFLYHFKNVRWAKGRHETYLCYVVKRRDSATSCSLDFGHLRNKSGCHVELLFL
RYISDWDLDPGRCYRVTWFTSWSPCYDCARHVAEFLRWNPNLSLRIFTARLYFCEDRKAEPE
GLRRLHRAGVQIGIMTFKDYFYCWNTFVENRERTFKAWEGLHENSVRLTRQLRRILLP
LYEVDDLRDAFRMLGF
(underline: nuclear localization sequence;
double underline: nuclear export signal)
Canine AID:
(SEQ ID NO: 227)
MDSLLMKQRKFLYHFKNVRWAKGRHETYLCYVVKRRDSATSFSLDFGHLRNKSGCHVELLFL
RYISDWDLDPGRCYRVTWFTSWSPCYDCARHVADFLRGYPNLSLRIFAARLYFCEDRKAEPE
GLRRLHRAGVQIAIMTFKDYFYCWNTFVENREKTFKAWEGLHENSVRLSRQLRRILLP
LYEVDDLRDAFRTLGL
(underline: nuclear localization sequence;
double underline: nuclear export signal)
Bovine AID:
(SEQ ID NO: 228)
MDSLLKKQRQFLYQFKNVRWAKGRHETYLCYVVKRRDSPTSFSLDFGHLRNKAGCHVELLFL
RYISDWDLDPGRCYRVTWFTSWSPCYDCARHVADFLRGYPNLSLRIFTARLYFCDKERKAEP
EGLRRLHRAGVQIAIMTFKDYFYCWNTFVENHERTFKAWEGLHENSVRLSRQLRRILLP
LYEVDDLRDAFRTLGL
(underline: nuclear localization sequence;
double underline: nuclear export signal)
Rat AID
(SEQ ID NO: 236)
MAVGSKPKAALVGPHWERERIWCFLCSTGLGTQQTGQTSRWLRPAATQDPVSPPRSLLMKQR
KFLYHFKNVRWAKGRHETYLCYVVKRRDSATSFSLDFGYLRNKSGCHVELLFLRYISDWDLD
PGRCYRVTWFTSWSPCYDCARHVADFLRGNPNLSLRIFTARLTGWGALPAGLMSPARPSDYF
YCWNTFVENHERTFKAWEGLHENSVRLSRRLRRILLPLYEVDDLRDAFRTLGL
(underline: nuclear localization sequence;
double underline: nuclear export signal)
Mouse APOBEC-3
(SEQ ID NO: 237)
MGPFCLGCSHRKCYSPIRNLISQETFKFHFKNLGYAKGRKDTFLCYEVTRKDCDSPVSLHHG
VFKNRDNIHAEICFLYWFHDKVLKVLSPREEFKITWYMSWSPCFECAEQIVRFLNTRWLSL
DIFSSRLYNVQDPETQQNLCRLVQEGAQVAAMDLYEFKKCWKKFVDNGGRRFRPWKRLLTNF
RYQDSKLQEILRPCYIPVPSSSSSTLSNICLTKGLPETRFCVEGRRMDPLSEEEFYSQFYNQ
RVKHLCYYHRMKPYLCYQLEQFNGQAPLKGCLLSEKGKQHAEILFLDKIRSMELSOVTITCY
AWSPCPNCAWQLAAFKRDRPDLILHIYTSRLYFHWKRPFQKGLCSLWQSGILVDVMDLPQF
TDCWTNFVNPKRPFWPWKGLEIISRRTQRRLRRIKESWGLQDLVNDFGNLQLGPPMS
(italic: nucleic acid editing domain)
Rat APOBEC-3:
(SEQ ID NO: 238)
MGPFCLGCSHRKCYSPIRNLISQETFKFHFKNRLRYAIDRKDTELCYEVTRKDCDSPVSLHH
GVFKNKDNIHAEICFLYWFHDKVLKVLSPREEFKITWYMSWSPCFECAEQVLRFLATHHNLS
LDIFSSRLYNIRDPENQQNLCRLVQEGAQVAAMDLYEFKKCWKKFVDNGGRRFRPWKKLLTN
FRYQDSKLQEILRPCYIPVPSSSSSTLSNICLTKGLPETRFCVERRRVHLLSEEEFYSQFYN
QRVKHLCYYHGVKPYLCYQLEQFNGQAPLKGCLLSEKGKQHAEILFLDKIRSMELSOVIITC
YLTWSPCPNCAWQLAAFKRDRPDLILHIYTSRLYFHWKRPFQKGLCSLWQSGILVDVMDLPQ
FTDCWTNFVNPKRPFWPWKGLEIISRRTQRRLHRIKESWGLQDLVNDFGNLQLGPPMS
(italic: nucleic acid editing domain)
Rhesus macaque APOBEC-3G:
(SEQ ID NO: 239)
MVEPMDPRTFVSNFNNRPILSGLNTVWLCCEVKTKDPSGPPLDAKIFQGKVYSKAKYHPEMR
FLRWFHKWROLHHDOEYKVTWYVSWSPCTRCANSVATFLAKDPKVTLTIFVARLYYFWKPDY
QQALRILCQKRGGPHATMKIMNYNEFQDCWNKFVDGRGKPFKPRNNLPKHYTLLQATLGELL
RHLMDPGTFTSNFNNKPWVSGQHETYLCYKVERLHNDTWVPLNQHRGFLRNQAPNIHGFPKG
RHAELCFLDLIPFWKLDGQQYRVTCFTSWSPCFSCAQEMARFISNNEHVSLCIFAARIYDDQ
GRYQEGLRALHRDGAKIAMMNYSEFEYCWDTFVDRQGRPFQPWDGLDEHSQALSGRLRAI
(italic: nucleic acid editing domain;
underline: cytoplasmic localization signal)
Chimpanzee APOBEC-3G:
(SEQ ID NO: 240)
MKPHFRNPVERMYQDTFSDNFYNRPILSHRNTVWLCYEVKTKGPSRPPLDAKIFRGQVYSKL
KYHPEMRFFHWFSKWRKLHRDQEYEVTWYISWSPCTKCTRDVAYFLAEDPKVTLTIFVARLY
YFWDPDYQEALRSLCQKRDGPRATMKIMNYDEFQHCWSKFVYSQRELFEPWNNLPKYYILLH
IMLGEILRHSMDPPTFTSNFNNELWVRGRHETYLCYEVERLHNDTWVLLNQRRGFLCNQAPH
RRGFLEGRHAELCFLDVIPFWKLDLHQDYRVTCFTSWSPCFSCAQEMARFISRRRHVSLCIF
AARIYDDQGRCQEGLRTLAKAGAKISIMTYSEFKHCWDTFVDHQGCPFQPWDGLEEHSQALS
GRLRAILQNQGN
(italic: nucleic acid editing domain;
underline: cytoplasmic localization signal)
Green monkey APOBEC-3G:
(SEQ ID NO: 241)
MNPQIRNMVEQMEPDIFVYYFNNRPILSGRNTVWLCYEVKTKDPSGPPLDANIFQGKLYPEA
KDHPEMKFLHWFRKWRQLHRDQEYEVTWYVSWSPCTRCANSVATFLAEDPKVTLTIFVARLY
YFWKPDYQQALRILCQERGGPHATMKIMNYNEFQHCWNEFVDGQGKPFKPRKNLPKHYTLLH
ATLGELLRHVMDPGTFTSNFNNKPWVSGQRETYLCYKVERSHNDTWVLLNQHRGFLRNQAPD
RHGFPKGRHAELCELDLTPEWKLDDQOYRVTCFTSWSPCFSCAQKMAKFISNNKHVSLCIFA
ARIYDDQGRCQEGLRTLHRDGAKIAVMNYSEFEYCWDTFVDRQGRPFQPWDGLDEHSQALSG
RLRAI
(italic: nucleic acid editing domain;
underline: cytoplasmic localization signal)
Human APOBEC-3G:
(SEQ ID NO: 221)
MKPHFRNTVERMYRDTFSYNFYNRPILSRRNTVWLCYEVKTKGPSRPPLDAKIFRGQVYSEL
KYHPEMRFFHWFSKWRKLHRDQEYEVTWYISWSPCTKCTRDMATFLAEDPKVTLTIFVARLY
YFWDPDYQEALRSLCQKRDGPRATMKIMNYDEFQHCWSKFVYSQRELFEPWNNLPKYYILLH
IMLGEILRHSMDPPTFTFNFNNEPWVRGRHETYLCYEVERMHNDTWVLLNQRRGFLCNQAPH
KHGFLEGRHAELCFLDVIPFWKLDLDODYRVTCFTSWSPCFSCAQEMAKFISKNKHVSLCIF
TARIYDDQGRCQEGLRTLAEAGAKISIMTYSEFKHCWDTFVDHQGCPFQPWDGLDEHSQDLS
GRLRAILQNQEN
(italic: nucleic acid editing domain;
underline: cytoplasmic localization signal)
Human APOBEC-3F:
(SEQ ID NO: 220)
MKPHFRNTVERMYRDTFSYNFYNRPILSRRNTVWLCYEVKTKGPSRPRLDAKIFRGQVYSQP
ERHAEMCFLSWFCGNQLPAYKCFQITWFVSWTPCPDCVAKLAEFLAEHPNVTLTISAARLYY
YWERDYRRALCRLSQAGARVKIMDDEEFAYCWENFVYSEGQPFMPWYKFDDNYAFLHRTLKE
ILRNPMEAMYPHIFYFHFKNLRKAYGRNESWLCFTMEVVKHHSPVSWKRGVFRNQVDPETHC
HAERCFLSWECDDILSPNTNYEVTWYTSWSPCPECAGEVAEFLARHSNVNLTIFTARLYYFW
DTDYQEGLRSLSQEGASVEIMGYKDFKYCWENFVYNDDEPFKPWKGLKYNFLFLDSKLQEIL
E
(italic: nucleic acid editing domain)
Human APOBEC-3B:
(SEQ ID NO: 217)
MNPQIRNPMERMYRDTFYDNFENEPILYGRSYTWLCYEVKIKRGRSNLLWDTGVFRGQVYFK
PQYHAEMCFLSWFCGNQLPAYKCFQITWFVSWTPCPDCVAKLAEFLSEHPNVYLYISAARLY
YYWERDYRRALCRLSQAGARVTIMDYEEFAYCWENFVYNEGQQFMPWYKFDENYAFLHRTLK
EILRYLMDPDTFTFNFNNDPLVLRRRQTYLCYEVERLDNGTWVLMDQHMGFLCNEAKNLLCG
FYGRHAELRFLDLVPSLQLDPAQIYRVTWFISWSPCFSWGCAGEVRAFLQENTHVRLRIFAA
RIYDYDPLYKEALQMLRDAGAQVSIMTYDEFEYCWDTFVYRQGCPFQPWDGLEEHSQALSGR
LRAILQNQGN
(italic: nucleic acid editing domain)
Rat APOBEC-3B:
(SEQ ID NO: 242)
MQPQGLGPNAGMGPVCLGCSHRRPYSPIRNPLKKLYQQTFYFHFKNVRYAWGRKNNFLCYEV
NGMDCALPVPLRQGVFRKQGHIHAELCFIYWFHDKVLRVLSPMEEFKVTWYMSWSPCSKCAE
QVARFLAAHRNLSLAIFSSRLYYYLRNPNYQQKLCRLIQEGVHVAAMDLPEFKKCWNKFVDN
DGQPFRPWMRLRINFSFYDCKLQEIFSRMNLLREDVFYLQFNNSHRVKPVQNRYYRRKSYLC
YQLERANGQEPLKGYLLYKKGEQHVEILFLEKMRSMELSQVRITCYLTWSPCPNCARQLAAF
KKDHPDLILRIYTSRLYFWRKKFQKGLCTLWRSGIHVDVMDLPQFADCWTNFVNPQRPFRPW
NELEKNSWRIQRRLRRIKESWGL
Bovine APOBEC-3B:
(SEQ ID NO: 243)
DGWEVAFRSGTVLKAGVLGVSMTEGWAGSGHPGQGACVWTPGTRNTMNLLREVLFKQQFGNQ
PRVPAPYYRRKTYLCYQLKQRNDLTLDRGCFRNKKQRHAERFIDKINSLDLNPSQSYKIICY
ITWSPCPNCANELVNFITRNNHLKLEIFASRLYFHWIKSFKMGLQDLQNAGISVAVMTHTEF
EDCWEQFVDNQSRPFQPWDKLEQYSASIRRRLQRILTAPI
Chimpanzee APOBEC-3B:
(SEQ ID NO: 244)
MNPQIRNPMEWMYQRTFYYNFENEPILYGRSYTWLCYEVKIRRGHSNLLWDTGVFRGQMYSQ
PEHHAEMCFLSWFCGNQLSAYKCFQITWFVSWTPCPDCVAKLAKFLAEHPNVTLTISAARLY
YYWERDYRRALCRLSQAGARVKIMDDEEFAYCWENFVYNEGQPFMPWYKFDDNYAFLHRTLK
EIIRHLMDPDTFTFNFNNDPLVLRRHQTYLCYEVERLDNGTWVLMDQHMGFLCNEAKNLLCG
FYGRHAELRFLDLVPSLQLDPAQIYRVTWFISWSPCFSWGCAGQVRAFLQENTHVRLRIFAA
RIYDYDPLYKEALQMLRDAGAQVSIMTYDEFEYCWDTFVYRQGCPFQPWDGLEEHSQALSGR
LRAILQVRASSLCMVPHRPPPPPQSPGPCLPLCSEPPLGSLLPTGRPAPSLPFLLTASFSFP
PPASLPPLPSLSLSPGHLPVPSFHSLTSCSIQPPCSSRIRETEGWASVSKEGRDLG
Human APOBEC-3C:
(SEQ ID NO: 218)
MNPQIRNPMKAMYPGTFYFQFKNLWEANDRNETWLCFTVEGIKRRSVVSWKTGVFRNQVDSE
YRCHAERCFLSWFCDDILSPNTKYQVTWYTSWSPCPDCAGEVAEFLARHSNVNLTIFTARLY
YFQYPCYQEGLRSLSQEGVAVEIMDYEDFKYCWENFVYNDNEPFKPWKGLKTNFRLLKRRLR
ESLQ
(italic: nucleic acid editing domain)
Gorilla APOBEC-3C3C
(SEQ ID NO: 245)
MNPQIRNPMKAMYPGTEYFQFKNLWEANDRNETWLCETVEGIKRRSVVSWKTGVFRNQVDSE
THCHAERCFLSWECDDILSPNTNYOVTWYTSWSPCPECAGEVAEFLARHSNVNLTIFTARLY
YFQDTDYQEGLRSLSQEGVAVKIMDYKDFKYCWENFVYNDDEPFKPWKGLKYNFRFLKRRLQ
EILE
Human APOBEC-3A:
(SEQ ID NO: 216)
MEASPASGPRHLMDPHIFTSNFNNGIGRHKTYLCYEVERLDNGTSVKMDQHRGFLHNQAKNL
LCGFYGRHAELRFLDLVPSLQLDPAQIYRVTWFISWSPCFSWGCAGEVRAFLQENTHVRLRI
FAARIYDYDPLYKEALQMLRDAGAQVSIMTYDEFKHCWDTFVDHQGCPFQPWDGLDEHSQAL
SGRLRAILQNQGN
(italic: nucleic acid editing domain)
Rhesus macaque APOBEC-3A:
(SEQ ID NO: 246)
MDGSPASRPRHLMDPNTFTFNFNNDLSVRGRHQTYLCYEVERLDNGTWVPMDERRGFLCNKA
KNVPCGDYGCHVELRFLCEVPSWQLDPAQTYRVTWFISWSPCFRRGCAGQVRVFLQENRHVR
LRIFAARIYDYDPLYQEALRTLRDAGAQVSIMTYEEFKHCWDTFVDRQGRPFQPWDGLDEHS
QALSGRLRAILQNQGN
(italic: nucleic acid editing domain)
Bovine APOBEC-3A3A:
(SEQ ID NO: 247)
MDEYTFTENFNNQGWPSKTYLCYEMERLDGDATIPLDEYKGFVRNKGLDQPEKPCHAEAYFL
GKIHSWNLDRNQHYRLTCFISWSPCYDCAQRLTTFLKENHHISLHILASRIYTHNRFGCHQS
GLCELQAAGARITIMTFEDFKHCWETFVDHKGKPFQPWEGLNVKSQALCTELQAILKTQQN
(italic: nucleic acid editing domain)
Human APOBEC-3H:
(SEQ ID NO: 248)
MALLTAETFRLQFNNKRRLRRPYYPRKALLCYQLTPQNGSTPTRGYFENKKKCHAEICFINE
IKSMGLDETQCYQVTCYLTWSPCSSCAWELVDFIKAHDHLNLGIFASRLYYHWCKPQQKGLR
LLCGSQVPVEVMGFPKFADCWENFVDHEKPLSFNPYKMLEELDKNSRAIKRRLERIKIPGVR
AQGRYMDILCDAEV
(italic: nucleic acid editing domain)
Rhesus macaque APOBEC-3H:
(SEQ ID NO: 249)
MALLTAKTFSLQFNNKRRVNKPYYPRKALLCYQLTPQNGSTPTRGHLKNKKKDHAEIRFINK
IKSMGLDETQCYQVTCYLTWSPCPSCAGELVDFIKAHRHLNLRIFASRLYYHWRPNYQEGLL
LLCGSQVPVEVMGLPEETDCWENEVDHKEPPSFNPSEKLEELDKNSQAIKRRLERIKSRSVD
VLENGLRSLQLGPVTPSSSIRNSR
Human APOBEC-3D:
(SEQ ID NO: 219)
MNPQIRNPMERMYRDTFYDNFENEP1LYGRSYTWLCYEVKIKRGRSNLLWDTGVFR
GPVLPKRQSNHRQEVYFRFENHAEMCFLSWFCGNRLPANRRFQITWFVSWNPCLPC
VVKVTKFLAEHPNVTLTISAARLYYYRDRDWRWVLLRLHKAGARVK1MDYEDFAY
CWENFVCNEGQPFMPWYKFDDNYASLHRTLKEILRNPMEAMYPHIFYFHFKNLLKA
CGRNESWLCFTMEVTKHHSAVFRKRGVFRNQVDPETHCHAERCFLSWFCDDILSPN
TNYEVTWYTSWSPCPECAGEVAEFLARHSNVNLTIFTARLCYFWDTDYQEGLCSLS
QEGASVKIMGYKDFVSCWKNFVYSDDEPFKPWKGLQTNFRLLKRRLREILQ
(italic: nucleic acid editing domain)
Human APOBEC-1:
(SEQ ID NO: 207)
MTSEKGPSTGDPTLRRRIEPWEFDVFYDPRELRKEACLLYEIKWGMSRKIWRSSGKNTTNHV
EVNFIKKFTSERDFHPSMSCSITWFLSWSPCWECSQAIREFLSRHPGVTLVIYVARLFWHMD
QQNRQGLRDLVNSGVTIQIMRASEYYHCWRNFVNYPPGDEAHWPQYPPLWMMLYALELHCI1
LSLPPCLKISRRWQNHLTFFRLHLQNCHYQTIPPHILLATGLIHPSVAWR
Mouse APOBEC-1:
(SEQ ID NO: 205)
MSSETGPVAVDPTLRRRIEPHEFEVFFDPRELRKETCLLYEINWGGRHSVWRHTSQNTSNHV
EVNFLEKFTTERYFRPNTRCSITWFLSWSPCGECSRAITEFLSRHPYVTLFIYIARLYHHTD
QRNRQGLRDLISSGVTIQIMTEQEYCYCWRNFVNYPPSNEAYWPRYPHLWVKLYVLELYCI1
LGLPPCLKILRRKQPQLTFFTITLQTCHYQRIPPHLLWATGLK
Rat APOBEC-1:
(SEQ ID NO: 204)
[sequence omitted]
Human APOBEC-2:
(SEQ ID NO: 212)
MAQKEEAAVATEAASQNGEDLENLDDPEKLKELIELPPFEIVTGERLPANFFKFQFRNVEYS
SGRNKTFLCYVVEAQGKGGQVOASRGYLEDEHAAAHAEEAFFNTILPAFDPALRYNVTWYVS
SSPCAACADRIIKTLSKTKNLRLLILVGRLFMWEEPEIQAALKKLKEAGCKLRIMKPQDFEY
VWQNFVEQEEGESKAFQPWEDIQENFLYYEEKLADILK
Mouse APOBEC-2:
(SEQ ID NO: 211)
MAQKEEAAEAAAPASQNGDDLENLEDPEKLKELIDLPPFEIVTGVRLPVNFFKFQFRNVEYS
SGRNKTFLCYWEVQSKGGQAQATQGYLEDEHAGAHAEEAFFNTILPAFDPALKYNVTWYVS
SSPCAACADRILKTLSKTKNLRLLILVSRLFMWEEPEVQAALKKLKEAGCKLRIMKPQDFEY
IWQNFVEQEEGESKAFEPWEDIQENFLYYEEKLADILK
Rat APOBEC-2:
(SEQ ID NO: 250)
MAQKEEAAEAAAPASQNGDDLENLEDPEKLKELIDLPPFEIVTGVRLPVNFFKFQFRNVEYS
SGRNKTFLCYVVEAQSKGGQVQATQGYLEDEHAGAHAEEAFFNTILPAFDPALKYNVTWYVS
SSPCAACADRILKTLSKTKNLRLLILVSRLFMWEEPEVQAALKKLKEAGCKLRIMKPQDFEY
LWQNFVEQEEGESKAFEPWEDIQENFLYYEEKLADILK
Bovine APOBEC-2:
(SEQ ID NO: 214)
MAQKEEAAAAAEPASQNGEEVENLEDPEKLKELIELPPFEIVTGERLPAHYFKFQFRNVEYS
SGRNKTFLCYVVEAQSKGGQVQASRGYLEDEHATNHAEEAFFNSIMPTFDPALRYMVTWYVS
SSPCAACADRIVKTLNKTKNLRLLILVGRLFMWEEPEIQAALRKLKEAGCRLRIMKPQDFEY
IWQNFVEQEEGESKAFEPWEDIQENFLYYEEKLADILK
Petromyzon marinusCDA1
(pmCDAl)
(SEQ ID NO: 251)
MTDAEYVRIHEKLDIYTFKKQFFNNKKSVSHRCYVLFELKRRGERRACFWGYAVNKPQSGTE
RGIHAEIFSIRKVEEYLRDNPGQFTINWYSSWSPCADCAEKILEWYNQELRGNGHTLKIWAC
KLYYEKNARNQIGLWNLRDNGVGLNVMVSEHYQCCRKIFIQSSHNQLNENRWLEKTLKRAEK
RRSELSFMIQVKILHTTKSPAV
Human APOBEC3G chain A
(SEQ ID NO: 252)
MDPPTFTFNFNNEPWWGRHETYLCYEVERMHNDTWVLLNQRRGFLCNQAPHKHGFLEGRHAE
LCFLDVIPFWKLDLDQDYRVTCFTSWSPCFSCAQEMAKFISKNKHVSLCIFTARIYDDQGRC
QEGLRTLAEAGAKISFTYSEFKHCWDTFVDHQGCPFQPWDGLDEHSQDLSGRLRAILQ

[0598] Other exemplary deaminases that can be internally fused within the amino acid sequence of a Cas12 according to aspects of this disclosure are provided below. It should be understood that, in some embodiments, the active domain of the respective sequence can be used, e.g., the domain without a localizing signal (e.g., a nuclear localization sequence, a nuclear export signal, or a cytoplasmic localizing signal).

[0599] Details of C to T nucleobase editing proteins are described in International PCT Application No. PCT/US2016/058344 (WO 2017/070632) and Komor, A. C., et al., “Programmable editing of a target base in genomic DNA without double-stranded DNA cleavage” Nature 533, 420-424 (2016), the entire contents of which are hereby incorporated by reference.

### Cytidine Deaminase

[0600] In one embodiment, a fusion protein of the invention comprises a cytidine deaminase. In some embodiments, the cytidine deaminases provided herein are capable of deaminating cytosine or 5-methylcytosine to uracil or thymine. In some embodiments, the cytosine deaminases provided herein are capable of deaminating cytosine in DNA. The cytidine deaminase may be derived from any suitable organism. In some embodiments, the cytidine deaminase is from a prokaryote. In some embodiments, the cytidine deaminase is from a bacterium. In some embodiments, the cytidine deaminase is from a mammal (e.g., human).

[0601] In some embodiments, the cytidine deaminase comprises an amino acid sequence that is at least 60%, at least 65%, at least 70%, at least 75%, at least 80%, at least 85%, at least 90%, at least 95%, at least 96%, at least 97%, at least 98%, at least 99%, or at least 99.5% identical to any one of the cytidine deaminase amino acid sequences set forth herein.

[0602] A fusion protein of the invention comprises a nucleic acid editing domain. In some embodiments, the nucleic acid editing domain can catalyze a C to U base change. In some embodiments, the nucleic acid editing domain is a deaminase domain. In some embodiments, the deaminase is a cytidine deaminase or an adenosine deaminase. In some embodiments, the deaminase is an apolipoprotein B mRNA-editing complex (APOBEC) family deaminase. In some embodiments, the deaminase is an APOBEC1 deaminase. In some embodiments, the deaminase is an APOBEC2 deaminase. In some embodiments, the deaminase is an APOBEC3 deaminase. In some embodiments, the deaminase is an APOBEC3 A deaminase. In some embodiments, the deaminase is an APOBEC3B deaminase. In some embodiments, the deaminase is an APOBEC3C deaminase. In some embodiments, the deaminase is an APOBEC3D deaminase. In some embodiments, the deaminase is an APOBEC3E deaminase. In some embodiments, the deaminase is an APOBEC3F deaminase. In some embodiments, the deaminase is an APOBEC3G deaminase. In some embodiments, the deaminase is an APOBEC3H deaminase. In some embodiments, the deaminase is an APOBEC4 deaminase. In some embodiments, the deaminase is an activation-induced deaminase (AID). In some embodiments, the deaminase is a vertebrate deaminase. In some embodiments, the deaminase is an invertebrate deaminase. In some embodiments, the deaminase is a human, chimpanzee, gorilla, monkey, cow, dog, rat, or mouse deaminase. In some embodiments, the deaminase is a human deaminase. In some embodiments, the deaminase is a rat deaminase, e.g., rAPOBEC1. In some embodiments, the deaminase is a Petromyzon marinus cytidine deaminase 1 (pmCDA1). In some embodiments, the deaminase is a human APOBEC3G. In some embodiments, the deaminase is a fragment of the human APOBEC3G. In some embodiments, the nucleic acid editing domain is at least 80%, at least 85%, at least 90%, at least 92%, at least 95%, at least 96%, at least 97%, at least 98%, at least 99%), or at least 99.5% identical to the deaminase domain of any deaminase described herein.

### Additional Domains

[0603] A base editor described herein can include any domain which helps to facilitate the nucleobase editing, modification or altering of a nucleobase of a polynucleotide. In some embodiments, a base editor comprises a polynucleotide programmable nucleotide binding domain (e.g., Cas9), a nucleobase editing domain (e.g., deaminase domain), and one or more additional domains. In some embodiments, the additional domain can facilitate enzymatic or catalytic functions of the base editor, binding functions of the base editor, or be inhibitors of cellular machinery (e.g., enzymes) that could interfere with the desired base editing result. In some embodiments, a base editor can comprise a nuclease, a nickase, a recombinase, a deaminase, a methyltransferase, a methylase, an acetylase, an acetyltransferase, a transcriptional activator, or a transcriptional repressor domain.

[0604] In some embodiments, a base editor can comprise an uracil glycosylase inhibitor (UGI) domain. A UGI domain can for example improve the efficiency of base editors comprising a cytidine deaminase domain by inhibiting the conversion of a U formed by deamination of a C back to the C nucleobase. In some embodiments, cellular DNA repair response to the presence of U: G heteroduplex DNA can be responsible for a decrease in nucleobase editing efficiency in cells. In such embodiments, uracil DNA glycosylase (UDG) can catalyze removal of U from DNA in cells, which can initiate base excision repair (BER), mostly resulting in reversion of the U:G pair to a C:G pair. In such embodiments, BER can be inhibited in base editors comprising one or more domains that bind the single strand, block the edited base, inhibit UGI, inhibit BER, protect the edited base, and/or promote repairing of the non-edited strand. Thus, this disclosure contemplates a base editor fusion protein comprising a UGI domain.

[0605] In some embodiments, a base editor comprises as a domain all or a portion of a double-strand break (DSB) binding protein. For example, a DSB binding protein can include a Gam protein of bacteriophage Mu that can bind to the ends of DSBs and can protect them from degradation. See Komor, A. C., et al., “Improved base excision repair inhibition and bacteriophage Mu Gam protein yields C:G-to-T:A base editors with higher efficiency and product purity” Science Advances 3:eaao4774 (2017), the entire content of which is hereby incorporated by reference.

[0606] Additionally, in some embodiments, a Gam protein can be fused to an N terminus of a base editor. In some embodiments, a Gam protein can be fused to a C-terminus of a base editor. The Gam protein of bacteriophage Mu can bind to the ends of double strand breaks (DSBs) and protect them from degradation. In some embodiments, using Gam to bind the free ends of DSB can reduce indel formation during the process of base editing. In some embodiments, 174-residue Gam protein is fused to the N terminus of the base editors. See. Komor, A. C., et al., “Improved base excision repair inhibition and bacteriophage Mu Gam protein yields C:G-to-T:A base editors with higher efficiency and product purity” Science Advances 3:eaao4774 (2017). In some embodiments, a mutation or mutations can change the length of a base editor domain relative to a wild-type domain. For example, a deletion of at least one amino acid in at least one domain can reduce the length of the base editor. In another case, a mutation or mutations do not change the length of a domain relative to a wild-type domain. For example, substitution(s) in any domain does/do not change the length of the base editor.

[0607] In some embodiments, a base editor can comprise as a domain all or a portion of a nucleic acid polymerase (NAP). For example, a base editor can comprise all or a portion of a eukaryotic NAP. In some embodiments, a NAP or portion thereof incorporated into a base editor is a DNA polymerase. In some embodiments, a NAP or portion thereof incorporated into a base editor has translesion polymerase activity. In some embodiments, a NAP or portion thereof incorporated into a base editor is a translesion DNA polymerase. In some embodiments, a NAP or portion thereof incorporated into a base editor is a Rev7, Rev1 complex, polymerase iota, polymerase kappa, or polymerase eta. In some embodiments, a NAP or portion thereof incorporated into a base editor is a eukaryotic polymerase alpha, beta, gamma, delta, epsilon, gamma, eta, iota, kappa, lambda, mu, or nu component. In some embodiments, a NAP or portion thereof incorporated into a base editor comprises an amino acid sequence that is at least 75%, 80%, 85%, 90%, 95%, 96%, 97%, 98%, 99%, or 99.5% identical to a nucleic acid polymerase (e.g., a translesion DNA polymerase).

### Other Nucleobase Editors

[0608] The invention provides for a modular multi-effector nucleobase editor wherein virtually any nucleobase editor known in the art can be inserted into the fusion protein described herein or swapped in for a cytidine deaminase or adenosine deaminase. In one embodiment, the invention features a multi-effector nucleobase editor comprising an abasic nucleobase editor domain. Abasic nucleobase editors are known in the art and described, for example, by Kavli et al., EMBO J. 15:3442-3447, 1996, which is incorporated herein by reference.

[0609] In one embodiment, a multi-effector nucleobase editor comprises the following domains A-C, A-D, or A-E:
[0610] NH₂-[A-B-C]-COOH,
[0611] NH₂-[A-B-C-D]-COOH, or
[0612] NH₂-[A-B-C-D-E]-COOH
   wherein A and C or A, C, and E, each comprises one or more of the following: an adenosine deaminase domain or an active fragment thereof, a cytidine deaminase domain or an active fragment thereof, a DNA glycosylase domain or an active fragment thereof; and where B or B and D, each comprises one or more domains having nucleic acid sequence specific binding activity.

[0613] In one embodiment, a multi-effector nucleobase editor comprises NH₂-[Aₙ-Bₒ-Cₙ]-COOH,
[0614] NH₂-[Aₙ-Bₒ-Cₙ-Dₒ]-COOH, or
[0615] NH₂-[Aₙ-Bₒ-Cₚ-Dₒ-Eq]-COOH;
   wherein A and C or A, C, and E, each comprises one or more of the following: an adenosine deaminase domain or an active fragment thereof, a cytidine deaminase domain or an active fragment thereof, and a DNA glycosylase domain or an active fragment thereof; and where n is an integer: 1, 2, 3, 4, or 5, and where p is an integer: 0, 1, 2, 3, 4, or 5; and B or B and D each comprises a domain having nucleic acid sequence specific binding activity; and wherein o is an integer: 1, 2, 3, 4, or 5.

### Base Editor System

[0616] Use of the base editor system provided herein comprises the steps of: (a) contacting a target nucleotide sequence of a polynucleotide (e.g., double- or single stranded DNA or RNA) of a subject with a base editor system comprising a nucleobase editor (e.g., an adenosine base editor) and a guide polynucleic acid (e.g., gRNA), wherein the target nucleotide sequence comprises a targeted nucleobase pair; (b) inducing strand separation of said target region; (c) converting a first nucleobase of said target nucleobase pair in a single strand of the target region to a second nucleobase; and (d) cutting no more than one strand of said target region, where a third nucleobase complementary to the first nucleobase base is replaced by a fourth nucleobase complementary to the second nucleobase. It should be appreciated that in some embodiments, step (b) is omitted. In some embodiments, said targeted nucleobase pair is a plurality of nucleobase pairs in one or more genes. In some embodiments, the base editor system provided herein is capable of multiplex editing of a plurality of nucleobase pairs in one or more genes. In some embodiments, the plurality of nucleobase pairs is located in the same gene. In some embodiments, the plurality of nucleobase pairs is located in one or more genes, wherein at least one gene is located in a different locus.

[0617] In some embodiments, the cut single strand (nicked strand) is hybridized to the guide nucleic acid. In some embodiments, the cut single strand is opposite to the strand comprising the first nucleobase. In some embodiments, the base editor comprises a Cas9 domain. In some embodiments, the first base is adenine, and the second base is not a G, C, A, or T. In some embodiments, the second base is inosine.

[0618] Base editing system as provided herein provides anew approach to genome editing that uses a fusion protein containing a catalytically defective Streptococcus pyogenes Cas9, a cytidine deaminase, and an inhibitor of base excision repair to induce programmable, single nucleotide (C→T or A→G) changes in DNA without generating double-strand DNA breaks, without requiring a donor DNA template, and without inducing an excess of stochastic insertions and deletions.

[0619] Provided herein are systems, compositions, and methods for editing a nucleobase using a base editor system. In some embodiments, the base editor system comprises (1) a base editor (BE) comprising a polynucleotide programmable nucleotide binding domain and a nucleobase editing domain (e.g., a deaminase domain) for editing the nucleobase; and (2) a guide polynucleotide (e.g., guide RNA) in conjunction with the polynucleotide programmable nucleotide binding domain. In some embodiments, the base editor system comprises an adenosine base editor (ABE). In some embodiments, the polynucleotide programmable nucleotide binding domain is a polynucleotide programmable DNA binding domain. In some embodiments, the polynucleotide programmable nucleotide binding domain is a polynucleotide programmable RNA binding domain. In some embodiments, the nucleobase editing domain is a deaminase domain. In some embodiments, a deaminase domain can be an adenine deaminase or an adenosine deaminase. In some embodiments, the adenosine base editor can deaminate adenine in DNA. In some embodiments, ABE comprises an evolved TadA variant.

[0620] Details of nucleobase editing proteins are described in International PCT Application Nos. PCT/2017/045381 (WO2018/027078) and PCT/US2016/058344 (WO2017/070632), each of which is incorporated herein by reference for its entirety. Also see Komor, A. C., et al., “Programmable editing of a target base in genomic DNA without double-stranded DNA cleavage” Nature 533, 420-424 (2016); Gaudelli, N. M., et al., “Programmable base editing of A•T to G•C in genomic DNA without DNA cleavage” Nature 551, 464-471 (2017); and Komor, A. C., et al., “Improved base excision repair inhibition and bacteriophage Mu Gam protein yields C:G-to-T:A base editors with higher efficiency and product purity” Science Advances 3:eaao4774 (2017), the entire contents of which are hereby incorporated by reference.

[0621] In some embodiments, a single guide polynucleotide may be utilized to target a deaminase to a target nucleic acid sequence. In some embodiments, a single pair of guide polynucleotides may be utilized to target different deaminases to a target nucleic acid sequence.

[0622] The nucleobase components and the polynucleotide programmable nucleotide binding component of a base editor system may be associated with each other covalently or non-covalently. For example, in some embodiments, the deaminase domain can be targeted to a target nucleotide sequence by a polynucleotide programmable nucleotide binding domain. In some embodiments, a polynucleotide programmable nucleotide binding domain can be fused or linked to a deaminase domain. In some embodiments, a polynucleotide programmable nucleotide binding domain can target a deaminase domain to a target nucleotide sequence by non-covalently interacting with or associating with the deaminase domain. For example, in some embodiments, the nucleobase editing component, e.g., the deaminase component can comprise an additional heterologous portion or domain that is capable of interacting with, associating with, or capable of forming a complex with an additional heterologous portion or domain that is part of a polynucleotide programmable nucleotide binding domain. In some embodiments, the additional heterologous portion may be capable of binding to, interacting with, associating with, or forming a complex with a polypeptide. In some embodiments, the additional heterologous portion may be capable of binding to, interacting with, associating with, or forming a complex with a polynucleotide. In some embodiments, the additional heterologous portion may be capable of binding to a guide polynucleotide. In some embodiments, the additional heterologous portion may be capable of binding to a polypeptide linker. In some embodiments, the additional heterologous portion may be capable of binding to a polynucleotide linker. The additional heterologous portion may be a protein domain. In some embodiments, the additional heterologous portion may be a K Homology (KH) domain, a MS2 coat protein domain, a PP7 coat protein domain, a SfMu Com coat protein domain, a steril alpha motif, a telomerase Ku binding motif and Ku protein, a telomerase Sm7 binding motif and Sm7 protein, or an RNA recognition motif.

[0623] A base editor system may further comprise a guide polynucleotide component. It should be appreciated that components of the base editor system may be associated with each other via covalent bonds, noncovalent interactions, or any combination of associations and interactions thereof. In some embodiments, a deaminase domain can be targeted to a target nucleotide sequence by a guide polynucleotide. For example, in some embodiments, the nucleobase editing component of the base editor system, e.g., the deaminase component, can comprise an additional heterologous portion or domain (e.g., polynucleotide binding domain such as an RNA or DNA binding protein) that is capable of interacting with, associating with, or capable of forming a complex with a portion or segment (e.g., a polynucleotide motif) of a guide polynucleotide. In some embodiments, the additional heterologous portion or domain (e.g., polynucleotide binding domain such as an RNA or DNA binding protein) can be fused or linked to the deaminase domain. In some embodiments, the additional heterologous portion may be capable of binding to, interacting with, associating with, or forming a complex with a polypeptide. In some embodiments, the additional heterologous portion may be capable of binding to, interacting with, associating with, or forming a complex with a polynucleotide. In some embodiments, the additional heterologous portion may be capable of binding to a guide polynucleotide. In some embodiments, the additional heterologous portion may be capable of binding to a polypeptide linker. In some embodiments, the additional heterologous portion may be capable of binding to a polynucleotide linker. The additional heterologous portion may be a protein domain. In some embodiments, the additional heterologous portion may be a K Homology (KH) domain, a MS2 coat protein domain, a PP7 coat protein domain, a SfMu Com coat protein domain, a sterile alpha motif, a telomerase Ku binding motif and Ku protein, a telomerase Sm7 binding motif and Sm7 protein, or an RNA recognition motif.

[0624] In some embodiments, a base editor system can further comprise an inhibitor of base excision repair (BER) component. It should be appreciated that components of the base editor system may be associated with each other via covalent bonds, noncovalent interactions, or any combination of associations and interactions thereof. The inhibitor of BER component may comprise a base excision repair inhibitor. In some embodiments, the inhibitor of base excision repair can be a uracil DNA glycosylase inhibitor (UGI). In some embodiments, the inhibitor of base excision repair can be an inosine base excision repair inhibitor. In some embodiments, the inhibitor of base excision repair can be targeted to the target nucleotide sequence by the polynucleotide programmable nucleotide binding domain. In some embodiments, a polynucleotide programmable nucleotide binding domain can be fused or linked to an inhibitor of base excision repair. In some embodiments, a polynucleotide programmable nucleotide binding domain can be fused or linked to a deaminase domain and an inhibitor of base excision repair. In some embodiments, a polynucleotide programmable nucleotide binding domain can target an inhibitor of base excision repair to a target nucleotide sequence by non-covalently interacting with or associating with the inhibitor of base excision repair. For example, in some embodiments, the inhibitor of base excision repair component can comprise an additional heterologous portion or domain that is capable of interacting with, associating with, or capable of forming a complex with an additional heterologous portion or domain that is part of a polynucleotide programmable nucleotide binding domain. In some embodiments, the inhibitor of base excision repair can be targeted to the target nucleotide sequence by the guide polynucleotide. For example, in some embodiments, the inhibitor of base excision repair can comprise an additional heterologous portion or domain (e.g., polynucleotide binding domain such as an RNA or DNA binding protein) that is capable of interacting with, associating with, or capable of forming a complex with a portion or segment (e.g., a polynucleotide motif) of a guide polynucleotide. In some embodiments, the additional heterologous portion or domain of the guide polynucleotide (e.g., polynucleotide binding domain such as an RNA or DNA binding protein) can be fused or linked to the inhibitor of base excision repair. In some embodiments, the additional heterologous portion may be capable of binding to, interacting with, associating with, or forming a complex with a polynucleotide. In some embodiments, the additional heterologous portion may be capable of binding to a guide polynucleotide. In some embodiments, the additional heterologous portion may be capable of binding to a polypeptide linker. In some embodiments, the additional heterologous portion may be capable of binding to a polynucleotide linker. The additional heterologous portion may be a protein domain. In some embodiments, the additional heterologous portion may be a K Homology (KH) domain, a MS2 coat protein domain, a PP7 coat protein domain, a SfMu Com coat protein domain, a sterile alpha motif, a telomerase Ku binding motif and Ku protein, a telomerase Sm7 binding motif and Sm7 protein, or an RNA recognition motif.

[0625] In some embodiments, the base editor inhibits base excision repair (BER) of the edited strand. In some embodiments, the base editor protects or binds the non-edited strand. In some embodiments, the base editor comprises UGI activity. In some embodiments, the base editor comprises a catalytically inactive inosine-specific nuclease. In some embodiments, the base editor comprises nickase activity. In some embodiments, the intended edit of base pair is upstream of a PAM site. In some embodiments, the intended edit of base pair is 1, 2, 3, 4, 5, 6, 7, 8, 9, 10, 11, 12, 13, 14, 15, 16, 17, 18, 19, or 20 nucleotides upstream of the PAM site. In some embodiments, the intended edit of base-pair is downstream of a PAM site. In some embodiments, the intended edited base pair is 1, 2, 3, 4, 5, 6, 7, 8, 9, 10, 11, 12, 13, 14, 15, 16, 17, 18, 19, or 20 nucleotides downstream stream of the PAM site.

[0626] In some embodiments, the method does not require a canonical (e.g., NGG) PAM site. In some embodiments, the nucleobase editor comprises a linker or a spacer. In some embodiments, the linker or spacer is 1-25 amino acids in length. In some embodiments, the linker or spacer is 5-20 amino acids in length. In some embodiments, the linker or spacer is 10, 11, 12, 13, 14, 15, 16, 17, 18, 19, or 20 amino acids in length.

[0627] In some embodiments, the base editing fusion proteins provided herein need to be positioned at a precise location, for example, where a target base is placed within a defined region (e.g., a “deamination window”). In some embodiments, a target can be within a 4 base region. In some embodiments, such a defined target region can be approximately 15 bases upstream of the PAM. See Komor, A. C., et al., “Programmable editing of a target base in genomic DNA without double-stranded DNA cleavage” Nature 533, 420-424 (2016); Gaudelli, N. M., et al., “Programmable base editing of A•T to G•C in genomic DNA without DNA cleavage” Nature 551, 464-471 (2017); and Komor, A. C., et al., “Improved base excision repair inhibition and bacteriophage Mu Gam protein yields C:G-to-T:A base editors with higher efficiency and product purity” Science Advances 3:eaao4774 (2017), the entire contents of which are hereby incorporated by reference.

[0628] In some embodiments, the target region comprises a target window, wherein the target window comprises the target nucleobase pair. In some embodiments, the target window comprises 1-10 nucleotides. In some embodiments, the target window is 1, 2, 3, 4, 5, 6, 7, 8, 9, 10, 11, 12, 13, 14, 15, 16, 17, 18, 19, or 20 nucleotides in length. In some embodiments, the intended edit of base pair is within the target window. In some embodiments, the target window comprises the intended edit of base pair. In some embodiments, the method is performed using any of the base editors provided herein. In some embodiments, a target window is a deamination window. A deamination window can be the defined region in which a base editor acts upon and deaminates a target nucleotide. In some embodiments, the deamination window is within a 2, 3, 4, 5, 6, 7, 8, 9, or 10 base regions. In some embodiments, the deamination window is 5, 6, 7, 8, 9, 10, 11, 12, 13, 14, 15, 16, 17, 18, 19, 20, 21, 22, 23, 24, or 25 bases upstream of the PAM.

[0629] The base editors of the present disclosure can comprise any domain, feature or amino acid sequence which facilitates the editing of a target polynucleotide sequence. For example, in some embodiments, the base editor comprises a nuclear localization sequence (NLS). In some embodiments, an NLS of the base editor is localized between a deaminase domain and a polynucleotide programmable nucleotide binding domain. In some embodiments, an NLS of the base editor is localized C-terminal to a polynucleotide programmable nucleotide binding domain.

[0630] Other exemplary features that can be present in a base editor as disclosed herein are localization sequences, such as cytoplasmic localization sequences, export sequences, such as nuclear export sequences, or other localization sequences, as well as sequence tags that are useful for solubilization, purification, or detection of the fusion proteins. Suitable protein tags provided herein include, but are not limited to, biotin carboxylase carrier protein (BCCP) tags, myc-tags, calmodulin-tags, FLAG-tags, hemagglutinin (HA)-tags, polyhistidine tags, also referred to as histidine tags or His-tags, maltose binding protein (MBP)-tags, nus-tags, glutathione-S-transferase (GST)-tags, green fluorescent protein (GFP)-tags, thioredoxin-tags, S-tags, Softags (e.g., Softag 1, Softag 3), strep-tags, biotin ligase tags, FlAsH tags, V5 tags, and SBP-tags. Additional suitable sequences will be apparent to those of skill in the art. In some embodiments, the fusion protein comprises one or more His tags.

[0631] Non-limiting examples of protein domains which can be included in the fusion protein include deaminase domains (e.g., cytidine deaminase, adenosine deaminase), a uracil glycosylase inhibitor (UGI) domain, epitope tags, and reporter gene sequences.

[0632] Non-limiting examples of epitope tags include histidine (His) tags, V5 tags, FLAG tags, influenza hemagglutinin (HA) tags, Myc tags, VSV-G tags, and thioredoxin (Trx) tags. Examples of reporter genes include, but are not limited to, glutathione-5-transferase (GST), horseradish peroxidase (HRP), chloramphenicol acetyltransferase (CAT) beta-galactosidase, beta-glucuronidase, luciferase, green fluorescent protein (GFP), HcRed, DsRed, cyan fluorescent protein (CFP), yellow fluorescent protein (YFP), and autofluorescent proteins including blue fluorescent protein (BFP). Additional protein sequences can include amino acid sequences that bind DNA molecules or bind other cellular molecules, including, but not limited to, maltose binding protein (MBP), S-tag, Lex A DNA binding domain (DBD) fusions, GAL4 DNA binding domain fusions, and herpes simplex virus (HSV) BP16 protein fusions.

[0633] Base editors or base editor systems may be any base editor as described herein. In some embodiments, the base editor comprises an adenosine deaminase monomer or an adenosine deaminase dimer as described herein. In some embodiments, the base editor comprises a Cas9 with a deaminase, e.g. an adenosine deaminase, inserted in a flexible loop of the Cas9 polypeptide. In some embodiments, the base editor is generated by expression of two polynucleotides each encoding a N-terminal fragment and a C-terminal fragment of a Cas9-split intein fusion protein. A base editor may be delivered to a host cell via RNP, vector, viral vector, or nucleic acid such as mRNA delivery. In some embodiments, a polynucleotide construct encoding the base editor comprises the structure pMRNA-Trilink-ISLAY3-monoTadA-ABE7.10(V82S)-MQKFRAER 120A Bbsl, pMRNA-Trilink-ISLAY3-ABE7.10(V82S, Y147T, Q154S)-MQKFRAER 120A Bbsl, or pMRNA-Trilink-ISLAY3-ABE7.10(V82T, Y147T, Q154S)-MQKFRAER 120A Bbsl. The guide RNA may be chemically modified. In some embodiments, the guide RNA comprises one or more chemically modified nucleobases, such as 2′-O-methyl (2′-OMe), 2′-deoxy (2′-H), 2′-O—C1-3alkyl-O—C1-3alkyl such as 2′-methoxyethyl (“2′-MOE”), 2′-fluoro (“2′-F”), 2′-amino (“2′-NH₂”), 2′-arabinosyl (“2′-arabino”) nucleotide, 2′-F-arabinosyl (“2′-F-arabino”) nucleotide, 2′-locked nucleic acid (“LNA”) nucleotide, 2′-unlocked nucleic acid (“ULNA”) nucleotide, a sugar in L form (“L-sugar”), 4′-thioribosyl nucleotide, or any chemical modification as described herein. In some embodiments, the guide RNA comprises an internucleotide linkage modification such as phosphorothioate “P(S)” (P(S)), phosphonocarboxylate (P(CH2)nCOOR) such as phosphonoacetate “PACE” (P(CH2COO—)), thiophosphonocarboxylate ((S)P(CH2)nCOOR) such as thiophosphonoacetate “thioPACE” ((S)P(CH2)nCOO—)), alkylphosphonate (P(C1-3alkyl) such as methylphosphonate —P(CH3), boranophosphonate (P(BH3)), and phosphorodithioate (P(S)2). In some embodiments, the guide RNA comprises a nucleobase chemical modification such as 2-thiouracil (“2-thioU”), 2-thiocytosine (“2-thioC”), 4-thiouracil (“4-thioU”), 6-thioguanine (“6-thioG”), 2-aminoadenine (“2-aminoA”), 2-aminopurine, pseudouracil, hypoxanthine, 7-deazaguanine, 7-deaza-8-azaguanine, 7-deazaadenine, 7-deaza-8-azaadenine, 5-methylcytosine (“5-methylC”), 5-methyluracil (“5-methylU”), 5-hydroxymethylcytosine, 5-hydroxymethyluracil, 5,6-dehydrouracil, 5-propynylcytosine, 5-propynyluracil, 5-ethynylcytosine, 5-ethynyluracil, 5-allyluracil (“5-allylU”), 5-allylcytosine (“5-allylC”), 5-aminoallyluracil (“5-aminoallylU”), 5-aminoallyl-cytosine (“5-aminoallylC”), an abasic nucleotide, Z base, P base, Unstructured Nucleic Acid (“UNA”), isoguanine (“isoG”), isocytosine (“isoC”). In some embodiments, the guide RNA comprises one or more isotopic modifications on the nucleotide sugar, the nucleobase, the phosphodiester linkage and/or the nucleotide phosphates. Such modifications include nucleotides comprising one or more 15N, 13C, 14C, Deuterium, 3H, 32P, 125I, 131I atoms or other atoms or elements thereof.

[0634] In some embodiments, the adenosine base editor (ABE) can deaminate adenine in DNA. In some embodiments, ABE is generated by replacing APOBEC component of BE3 with natural or engineered E. coli TadA, human ADAR2, mouse ADA, or human ADAT2. In some embodiments, ABE comprises evolved TadA variant. In some embodiments, the ABE is ABE 1.2 (TadA*-XTEN-nCas9-NLS). In some embodiments, TadA* comprises A106V and D108N mutations.

[0635] In some embodiments, the ABE is a second-generation ABE. In some embodiments, the ABE is ABE2.1, which comprises additional mutations D147Y and E155V in TadA* (TadA*2.1). In some embodiments, the ABE is ABE2.2, ABE2.1 fused to catalytically inactivated version of human alkyl adenine DNA glycosylase (AAG with E125Q mutation). In some embodiments, the ABE is ABE2.3, ABE2.1 fused to catalytically inactivated version of E. coli Endo V (inactivated with D35A mutation). In some embodiments, the ABE is ABE2.6 which has a linker twice as long (32 amino acids, (SGGS)₂-XTEN-(SGGS)₂ (“(SGGS)₂” disclosed as SEQ ID NO: 253)) as the linker in ABE2.1. In some embodiments, the ABE is ABE2.7, which is ABE2.1 tethered with an additional wild-type TadA monomer. In some embodiments, the ABE is ABE2.8, which is ABE2.1 tethered with an additional TadA*2.1 monomer. In some embodiments, the ABE is ABE2.9, which is a direct fusion of evolved TadA (TadA*2.1) to the N-terminus of ABE2.1. In some embodiments, the ABE is ABE2.10, which is a direct fusion of wild-type TadA to the N-terminus of ABE2.1. In some embodiments, the ABE is ABE2.11, which is ABE2.9 with an inactivating E59A mutation at the N-terminus of TadA* monomer. In some embodiments, the ABE is ABE2.12, which is ABE2.9 with an inactivating E59A mutation in the internal TadA* monomer.

[0636] In some embodiments, the ABE is a third generation ABE. In some embodiments, the ABE is ABE3.1, which is ABE2.3 with three additional TadA mutations (L84F, H123Y, and I156F).

[0637] In some embodiments, the ABE is a fourth generation ABE. In some embodiments, the ABE is ABE4.3, which is ABE3.1 with an additional TadA mutation A142N (TadA*4.3).

[0638] In some embodiments, the ABE is a fifth generation ABE. In some embodiments, the ABE is ABE5.1, which is generated by importing a consensus set of mutations from surviving clones (H36L, R51L, S146C, and K157N) into ABE3.1. In some embodiments, the ABE is ABE5.3, which has a heterodimeric construct containing wild-type E. coli TadA fused to an internal evolved TadA*. In some embodiments, the ABE is ABE5.2, ABE5.4, ABE5.5, ABE5.6, ABE5.7, ABE5.8, ABE5.9, ABE5.10, ABE5.11, ABE5.12, ABE5.13, or ABE5.14, as shown in below Table 6. In some embodiments, the ABE is a sixth generation ABE. In some embodiments, the ABE is ABE6.1, ABE6.2, ABE6.3, ABE6.4, ABE6.5, or ABE6.6, as shown in below Table 6. In some embodiments, the ABE is a seventh generation ABE. In some embodiments, the ABE is ABE7.1, ABE7.2, ABE7.3, ABE7.4, ABE7.5, ABE7.6, ABE7.7, ABE7.8, ABE 7.9, or ABE7.10, as shown in Table 6 below.

TABLE 6
Genotypes of ABEs

| | 23 | 26 | 36 | 37 | 48 | 49 | 51 | 72 | 84 | 87 | 106 | 108 | 123 | 125 | 142 | 146 | 147 | 152 | 155 | 156 | 157 | 161 |
|---|---|---|---|---|---|---|---|---|---|---|---|---|---|---|---|---|---|---|---|---|---|---|
| ABE0.1 | W | R | H | N | P | | R | N | L | S | A | D | H | G | A | S | D | R | E | I | K | K |
| ABE0.2 | W | R | H | N | P | | R | N | L | S | A | D | H | G | A | S | D | R | E | I | K | K |
| ABE1.1 | W | R | H | N | P | | R | N | L | S | A | N | H | G | A | S | D | R | E | I | K | K |
| ABE1.2 | W | R | H | N | P | | R | N | L | S | V | N | H | G | A | S | D | R | E | I | K | K |
| ABE2.1 | W | R | H | N | P | | R | N | L | S | V | N | H | G | A | S | Y | R | V | I | K | K |
| ABE2.2 | W | R | H | N | P | | R | N | L | S | V | N | H | G | A | S | Y | R | V | I | K | K |
| ABE2.3 | W | R | H | N | P | | R | N | L | S | V | N | H | G | A | S | Y | R | V | I | K | K |
| ABE2.4 | W | R | H | N | P | | R | N | L | S | V | N | H | G | A | S | Y | R | V | I | K | K |
| ABE2.5 | W | R | H | N | P | | R | N | L | S | V | N | H | G | A | S | Y | R | V | I | K | K |
| ABE2.6 | W | R | H | N | P | | R | N | L | S | V | N | H | G | A | S | Y | R | V | I | K | K |
| ABE2.7 | W | R | H | N | P | | R | N | L | S | V | N | H | G | A | S | Y | R | V | I | K | K |
| ABE2.8 | W | R | H | N | P | | R | N | L | S | V | N | H | G | A | S | Y | R | V | I | K | K |
| ABE2.9 | W | R | H | N | P | | R | N | L | S | V | N | H | G | A | S | Y | R | V | I | K | K |
| ABE2.10 | W | R | H | N | P | | R | N | L | S | V | N | H | G | A | S | Y | R | V | I | K | K |
| ABE2.11 | W | R | H | N | P | | R | N | L | S | V | N | H | G | A | S | Y | R | V | I | K | K |
| ABE2.12 | W | R | H | N | P | | R | N | L | S | V | N | H | G | A | S | Y | R | V | I | K | K |
| ABE3.1 | W | R | H | N | P | | R | N | F | S | V | N | Y | G | A | S | Y | R | V | F | K | K |
| ABE3.2 | W | R | H | N | P | | R | N | F | S | V | N | Y | G | A | S | Y | R | V | F | K | K |
| ABE3.3 | W | R | H | N | P | | R | N | F | S | V | N | Y | G | A | S | Y | R | V | F | K | K |
| ABE3.4 | W | R | H | N | P | | R | N | F | S | V | N | Y | G | A | S | Y | R | V | F | K | K |
| ABE3.5 | W | R | H | N | P | | R | N | F | S | V | N | Y | G | A | S | Y | R | V | F | K | K |
| ABE3.6 | W | R | H | N | P | | R | N | F | S | V | N | Y | G | A | S | Y | R | V | F | K | K |
| ABE3.7 | W | R | H | N | P | | R | N | F | S | V | N | Y | G | A | S | Y | R | V | F | K | K |
| ABE3.8 | W | R | H | N | P | | R | N | F | S | V | N | Y | G | A | S | Y | R | V | F | K | K |
| ABE4.1 | W | R | H | N | P | | R | N | L | S | V | N | H | G | N | S | Y | R | V | I | K | K |
| ABE4.2 | W | G | H | N | P | | R | N | L | S | V | N | H | G | N | S | Y | R | V | I | K | K |
| ABE4.3 | W | R | H | N | P | | R | N | F | S | V | N | Y | G | N | S | Y | R | V | F | K | K |
| ABE5.1 | W | R | L | N | P | | L | N | F | S | V | N | Y | G | A | C | Y | R | V | F | N | K |
| ABE5.2 | W | R | H | S | P | | R | N | F | S | V | N | Y | G | A | S | Y | R | V | F | K | T |
| ABE5.3 | W | R | L | N | P | | L | N | I | S | V | N | Y | G | A | C | Y | R | V | F | N | K |
| ABE5.4 | W | R | H | S | P | | R | N | F | S | V | N | Y | G | A | S | Y | R | V | F | K | T |
| ABE5.5 | W | R | L | N | P | | L | N | F | S | V | N | Y | G | A | C | Y | R | V | F | N | K |
| ABE5.6 | W | R | L | N | P | | L | N | F | S | V | N | Y | G | A | C | Y | R | V | F | N | K |
| ABE5.7 | W | R | L | N | P | | L | N | F | S | V | N | Y | G | A | C | Y | R | V | F | N | K |
| ABE5.8 | W | R | L | N | P | | L | N | F | S | V | N | Y | G | A | C | Y | R | V | F | N | K |
| ABE5.9 | W | R | L | N | P | | L | N | F | S | V | N | Y | G | A | C | Y | R | V | F | N | K |
| ABE5.10 | W | R | L | N | P | | L | N | F | S | V | N | Y | G | A | C | Y | R | V | F | N | K |
| ABE5.11 | W | R | L | N | P | | L | N | F | S | V | N | Y | G | A | C | Y | R | V | F | N | K |
| ABE5.12 | W | R | L | N | P | | L | N | F | S | V | N | Y | G | A | C | Y | R | V | F | N | K |
| ABE5.13 | W | R | H | N | P | | L | D | F | S | V | N | Y | A | A | S | Y | R | V | F | K | K |
| ABE5.14 | W | R | H | N | S | | L | N | F | C | V | N | Y | G | A | S | Y | R | V | F | K | K |
| ABE6.1 | W | R | H | N | S | | L | N | F | S | V | N | Y | G | N | S | Y | R | V | F | K | K |
| ABE6.2 | W | R | H | N | T | V | L | N | F | S | V | N | Y | G | N | S | Y | R | V | F | N | K |
| ABE6.3 | W | R | L | N | S | | L | N | F | S | V | N | Y | G | A | C | Y | R | V | F | N | K |
| ABE6.4 | W | R | L | N | S | | L | N | F | S | V | N | Y | G | N | C | Y | R | V | F | N | K |
| ABE6.5 | W | R | L | N | T | V | L | N | F | S | V | N | Y | G | A | C | Y | R | V | F | N | K |
| ABE6.6 | W | R | L | N | T | V | L | N | F | S | V | N | Y | G | N | C | Y | R | V | F | N | K |
| ABE7.1 | W | R | L | N | A | | L | N | F | S | V | N | Y | G | A | C | Y | R | V | F | N | K |
| ABE7.2 | W | R | L | N | A | | L | N | F | S | V | N | Y | G | N | C | Y | R | V | F | N | K |
| ABE7.3 | L | R | L | N | A | | L | N | F | S | V | N | Y | G | A | C | Y | R | V | F | N | K |
| ABE7.4 | R | R | L | N | A | | L | N | F | S | V | N | Y | G | A | C | Y | R | V | F | N | K |
| ABE7.5 | W | R | L | N | A | | L | N | F | S | V | N | Y | G | A | C | Y | H | V | F | N | K |
| ABE7.6 | W | R | L | N | A | | L | N | I | S | V | N | Y | G | A | C | Y | P | V | F | N | K |
| ABE7.7 | L | R | L | N | A | | L | N | F | S | V | N | Y | G | A | C | Y | P | V | F | N | K |
| ABE7.8 | L | R | L | N | A | | L | N | F | S | V | N | Y | G | N | C | Y | R | V | F | N | K |
| ABE7.9 | L | R | L | N | A | | L | N | F | S | V | N | Y | G | N | C | Y | P | V | F | N | K |
| ABE7.10 | R | R | L | N | A | | L | N | F | S | V | N | Y | G | A | C | Y | P | V | F | N | K |

[0639] In some embodiments, the base editor is an adenosine base eitor. In some embodiments, the adenosine base editor is an eighth generation ABE (ABE8). In some embodiments, the ABE8 contains a TadA*8 variant. In some embodiments, the ABE8 has a monomeric construct containing a TadA*8 variant (“ABE8.x-m”). In some embodiments, the ABE8 is ABE8.1-m, which has a monomeric construct containing TadA*7.10 with a Y147T mutation (TadA*8.1). In some embodiments, the ABE8 is ABE8.2-m, which has a monomeric construct containing TadA*7.10 with a Y147R mutation (TadA*8.2). In some embodiments, the ABE8 is ABE8.3-m, which has a monomeric construct containing TadA*7.10 with a Q154S mutation (TadA*8.3). In some embodiments, the ABE8 is ABE8.4-m, which has a monomeric construct containing TadA*7.10 with a Y123H mutation (TadA*8.4). In some embodiments, the ABE8 is ABE8.5-m, which has a monomeric construct containing TadA*7.10 with a V82S mutation (TadA*8.5). In some embodiments, the ABE8 is ABE8.6-m, which has a monomeric construct containing TadA*7.10 with a T166R mutation (TadA*8.6). In some embodiments, the ABE8 is ABE8.7-m, which has a monomeric construct containing TadA*7.10 with a Q154R mutation (TadA*8.7). In some embodiments, the ABE8 is ABE8.8-m, which has a monomeric construct containing TadA*7.10 with Y147R, Q154R, and Y123H mutations (TadA*8.8). In some embodiments, the ABE8 is ABE8.9-m, which has a monomeric construct containing TadA*7.10 with Y147R, Q154R and I76Y mutations (TadA*8.9). In some embodiments, the ABE8 is ABE8.10-m, which has a monomeric construct containing TadA*7.10 with Y147R, Q154R, and T166R mutations (TadA*8.10). In some embodiments, the ABE8 is ABE8.11-m, which has a monomeric construct containing TadA*7.10 with Y147T and Q154R mutations (TadA*8.11). In some embodiments, the ABE8 is ABE8.12-m, which has a monomeric construct containing TadA*7.10 with Y147T and Q154S mutations (TadA*8.12). In some embodiments, the ABE8 is ABE8.13-m, which has a monomeric construct containing TadA*7.10 with Y123H (Y123H reverted from H123Y), Y147R, Q154R and I76Y mutations (TadA*8.13). In some embodiments, the ABE8 is ABE8.14-m, which has a monomeric construct containing TadA*7.10 with I76Y and V82S mutations (TadA*8.14). In some embodiments, the ABE8 is ABE8.15-m, which has a monomeric construct containing TadA*7.10 with V82S and Y147R mutations (TadA*8.15). In some embodiments, the ABE8 is ABE8.16-m, which has a monomeric construct containing TadA*7.10 with V82S, Y123H (Y123H reverted from H123Y) and Y147R mutations (TadA*8.16). In some embodiments, the ABE8 is ABE8.17-m, which has a monomeric construct containing TadA*7.10 with V82S and Q154R mutations (TadA*8.17). In some embodiments, the ABE8 is ABE8.18-m, which has a monomeric construct containing TadA*7.10 with V82S, Y123H (Y123H reverted from H123Y) and Q154R mutations (TadA*8.18). In some embodiments, the ABE8 is ABE8.19-m, which has a monomeric construct containing TadA*7.10 with V82S, Y123H (Y123H reverted from H123Y), Y147R and Q154R mutations (TadA*8.19). In some embodiments, the ABE8 is ABE8.20-m, which has a monomeric construct containing TadA*7.10 with I76Y, V82S, Y123H (Y123H reverted from H123Y), Y147R and Q154R mutations (TadA*8.20). In some embodiments, the ABE8 is ABE8.21-m, which has a monomeric construct containing TadA*7.10 with Y147R and Q154S mutations (TadA*8.21). In some embodiments, the ABE8 is ABE8.22-m, which has a monomeric construct containing TadA*7.10 with V82S and Q154S mutations (TadA*8.22). In some embodiments, the ABE8 is ABE8.23-m, which has a monomeric construct containing TadA*7.10 with V82S and Y123H (Y123H reverted from H123Y) mutations (TadA*8.23). In some embodiments, the ABE8 is ABE8.24-m, which has a monomeric construct containing TadA*7.10 with V82S, Y123H (Y123H reverted from H123Y), and Y147T mutations (TadA*8.24).

[0640] In some embodiments, the ABE8 has a heterodimeric construct containing wild-type E. coli TadA fused to a TadA*8 variant (“ABE8.x-d”). In some embodiments, the ABE8 is ABE8.1-d, which has a heterodimeric construct containing wild-type E. coli TadA fused to TadA*7.10 with a Y147T mutation (TadA*8.1). In some embodiments, the ABE8 is ABE8.2-d, which has a heterodimeric construct containing wild-type E. coli TadA fused to TadA*7.10 with a Y147R mutation (TadA*8.2). In some embodiments, the ABE8 is ABE8.3-d, which has a heterodimeric construct containing wild-type E. coli TadA fused to TadA*7.10 with a Q154S mutation (TadA*8.3). In some embodiments, the ABE8 is ABE8.4-d, which has a heterodimeric construct containing wild-type E. coli TadA fused to TadA*7.10 with a Y123H mutation (TadA*8.4). In some embodiments, the ABE8 is ABE8.5-d, which has a heterodimeric construct containing wild-type E. coli TadA fused to TadA*7.10 with a V82S mutation (TadA*8.5). In some embodiments, the ABE8 is ABE8.6-d, which has a heterodimeric construct containing wild-type E. coli TadA fused to TadA*7.10 with a T166R mutation (TadA*8.6). In some embodiments, the ABE8 is ABE8.7-d, which has a heterodimeric construct containing wild-type E. coli TadA fused to TadA*7.10 with a Q154R mutation (TadA*8.7). In some embodiments, the ABE8 is ABE8.8-d, which has a heterodimeric construct containing wild-type E. coli TadA fused to TadA*7.10 with Y147R, Q154R, and Y123H mutations (TadA*8.8). In some embodiments, the ABE8 is ABE8.9-d, which has a heterodimeric construct containing wild-type E. coli TadA fused to TadA*7.10 with Y147R, Q154R and I76Y mutations (TadA*8.9). In some embodiments, the ABE8 is ABE8.10-d, which has a heterodimeric construct containing wild-type E. coli TadA fused to TadA*7.10 with Y147R, Q154R, and T166R mutations (TadA*8.10). In some embodiments, the ABE8 is ABE8.11-d, which has a heterodimeric construct containing wild-type E. coli TadA fused to TadA*7.10 with Y147T and Q154R mutations (TadA*8.11). In some embodiments, the ABE8 is ABE8.12-d, which has heterodimeric construct containing wild-type E. coli TadA fused to TadA*7.10 with Y147T and Q154S mutations (TadA*8.12). In some embodiments, the ABE8 is ABE8.13-d, which has a heterodimeric construct containing wild-type E. coli TadA fused to TadA*7.10 with Y123H (Y123H reverted from H123Y), Y147R, Q154R and I76Y mutations (TadA*8.13). In some embodiments, the ABE8 is ABE8.14-d, which has a heterodimeric construct containing wild-type E. coli TadA fused to TadA*7.10 with I76Y and V82S mutations (TadA*8.14). In some embodiments, the ABE8 is ABE8.15-d, which has a heterodimeric construct containing wild-type E. coli TadA fused to TadA*7.10 with V82S and Y147R mutations (TadA*8.15). In some embodiments, the ABE8 is ABE8.16-d, which has a heterodimeric construct containing wild-type E. coli TadA fused to TadA*7.10 with V82S, Y123H (Y123H reverted from H123Y) and Y147R mutations (TadA*8.16). In some embodiments, the ABE8 is ABE8.17-d, which has a heterodimeric construct containing wild-type E. coli TadA fused to TadA*7.10 with V82S and Q154R mutations (TadA*8.17). In some embodiments, the ABE8 is ABE8.18-d, which has a heterodimeric construct containing wild-type E. coli TadA fused to TadA*7.10 with V82S, Y123H (Y123H reverted from H123Y) and Q154R mutations (TadA*8.18). In some embodiments, the ABE8 is ABE8.19-d, which has a heterodimeric construct containing wild-type E. coli TadA fused to TadA*7.10 with V82S, Y123H (Y123H reverted from H123Y), Y147R and Q154R mutations (TadA*8.19). In some embodiments, the ABE8 is ABE8.20-d, which has a heterodimeric construct containing wild-type E. coli TadA fused to TadA*7.10 with I76Y, V82S, Y123H (Y123H reverted from H123Y), Y147R and Q154R mutations (TadA*8.20). In some embodiments, the ABE8 is ABE8.21-d, which has a heterodimeric construct containing wild-type E. coli TadA fused to TadA*7.10 with Y147R and Q154S mutations (TadA*8.21). In some embodiments, the ABE8 is ABE8.22-d, which has a heterodimeric construct containing wild-type E. coli TadA fused to TadA*7.10 with V82S and Q154S mutations (TadA*8.22). In some embodiments, the ABE8 is ABE8.23-d, which has a heterodimeric construct containing wild-type E. coli TadA fused to TadA*7.10 with V82S and Y123H (Y123H reverted from H123Y) mutations (TadA*8.23). In some embodiments, the ABE8 is ABE8.24-d, which has a heterodimeric construct containing wild-type E. coli TadA fused to TadA*7.10 with V82S, Y123H (Y123H reverted from H123Y), and Y147T mutations (TadA*8.24).

[0641] In some embodiments, the ABE8 has a heterodimeric construct containing TadA*7.10 fused to a TadA*8 variant (“ABE8.x-7”). In some embodiments, the ABE8 is ABE8.1-7, which has a heterodimeric construct containing TadA*7.10 fused to TadA*7.10 with a Y147T mutation (TadA*8.1). In some embodiments, the ABE8 is ABE8.2-7, which has a heterodimeric construct containing TadA*7.10 fused to TadA*7.10 with a Y147R mutation (TadA*8.2). In some embodiments, the ABE8 is ABE8.3-7, which has a heterodimeric construct containing TadA*7.10 fused to TadA*7.10 with a Q154S mutation (TadA*8.3). In some embodiments, the ABE8 is ABE8.4-7, which has a heterodimeric construct containing TadA*7.10 fused to TadA*7.10 with a Y123H mutation (TadA*8.4). In some embodiments, the ABE8 is ABE8.5-7, which has a heterodimeric construct containing TadA*7.10 fused to TadA*7.10 with a V82S mutation (TadA*8.5). In some embodiments, the ABE8 is ABE8.6-7, which has a heterodimeric construct containing TadA*7.10 fused to TadA*7.10 with a T166R mutation (TadA*8.6). In some embodiments, the ABE8 is ABE8.7-7, which has a heterodimeric construct containing TadA*7.10 fused to TadA*7.10 with a Q154R mutation (TadA*8.7). In some embodiments, the ABE8 is ABE8.8-7, which has a heterodimeric construct containing TadA*7.10 fused to TadA*7.10 with Y147R, Q154R, and Y123H mutations (TadA*8.8). In some embodiments, the ABE8 is ABE8.9-7, which has a heterodimeric construct containing TadA*7.10 fused to TadA*7.10 with Y147R, Q154R and I76Y mutations (TadA*8.9). In some embodiments, the ABE8 is ABE8.10-7, which has a heterodimeric construct containing TadA*7.10 fused to TadA*7.10 with Y147R, Q154R, and T166R mutations (TadA*8.10). In some embodiments, the ABE8 is ABE8.11-7, which has a heterodimeric construct containing TadA*7.10 fused to TadA*7.10 with Y147T and Q154R mutations (TadA*8.11). In some embodiments, the ABE8 is ABE8.12-7, which has a heterodimeric construct containing TadA*7.10 fused to TadA*7.10 with Y147T and Q154S mutations (TadA*8.12). In some embodiments, the ABE8 is ABE8.13-7, which has a heterodimeric construct containing TadA*7.10 fused to TadA*7.10 with Y123H (Y123H reverted from H123Y), Y147R, Q154R and I76Y mutations (TadA*8.13). In some embodiments, the ABE8 is ABE8.14-7, which has a heterodimeric construct containing TadA*7.10 fused to TadA*7.10 with I76Y and V82S mutations (TadA*8.14). In some embodiments, the ABE8 is ABE8.15-7, which has a heterodimeric construct containing TadA*7.10 fused to TadA*7.10 with V82S and Y147R mutations (TadA*8.15). In some embodiments, the ABE8 is ABE8.16-7, which has a heterodimeric construct containing TadA*7.10 fused to TadA*7.10 with V82S, Y123H (Y123H reverted from H123Y) and Y147R mutations (TadA*8.16). In some embodiments, the ABE8 is ABE8.17-7, which has a heterodimeric construct containing TadA*7.10 fused to TadA*7.10 with V82S and Q154R mutations (TadA*8.17). In some embodiments, the ABE8 is ABE8.18-7, which has a heterodimeric construct containing TadA*7.10 fused to TadA*7.10 with V82S, Y123H (Y123H reverted from H123Y) and Q154R mutations (TadA*8.18). In some embodiments, the ABE8 is ABE8.19-7, which has a heterodimeric construct containing TadA*7.10 fused to TadA*7.10 with V82S, Y123H (Y123H reverted from H123Y), Y147R and Q154R mutations (TadA*8.19). In some embodiments, the ABE8 is ABE8.20-7, which has a heterodimeric construct containing TadA*7.10 fused to TadA*7.10 with I76Y, V82S, Y123H (Y123H reverted from H123Y), Y147R and Q154R mutations (TadA*8.20). In some embodiments, the ABE8 is ABE8.21-7, which has a heterodimeric construct containing TadA*7.10 fused to TadA*7.10 with Y147R and Q154S mutations (TadA*8.21). In some embodiments, the ABE8 is ABE8.22-7, which has a heterodimeric construct containing TadA*7.10 fused to TadA*7.10 with V82S and Q154S mutations (TadA*8.22). In some embodiments, the ABE8 is ABE8.23-7, which has a heterodimeric construct containing TadA*7.10 fused to TadA*7.10 with V82S and Y123H (Y123H reverted from H123Y) mutations (TadA*8.23). In some embodiments, the ABE8 is ABE8.24-7, which has a heterodimeric construct containing TadA*7.10 fused to TadA*7.10 with V82S, Y123H (Y123H reverted from H123Y), and Y147T mutations (TadA*8.24).

[0642] In some embodiments, the ABE is ABE8.1-m, ABE8.2-m, ABE8.3-m, ABE8.4-m, ABE8.5-m, ABE8.6-m, ABE8.7-m, ABE8.8-m, ABE8.9-m, ABE8.10-m, ABE8.11-m, ABE8.12-m, ABE8.13-m, ABE8.14-m, ABE8.15-m, ABE8.16-m, ABE8.17-m, ABE8.18-m, ABE8.19-m, ABE8.20-m, ABE8.21-m, ABE8.22-m, ABE8.23-m, ABE8.24-m, ABE8.1-d, ABE8.2-d, ABE8.3-d, ABE8.4-d, ABE8.5-d, ABE8.6-d, ABE8.7-d, ABE8.8-d, ABE8.9-d, ABE8.10-d, ABE8.11-d, ABE8.12-d, ABE8.13-d, ABE8.14-d, ABE8.15-d, ABE8.16-d, ABE8.17-d, ABE8.18-d, ABE8.19-d, ABE8.20-d, ABE8.21-d, ABE8.22-d, ABE8.23-d, or ABE8.24-d as shown in Table 7 below.

TABLE 7
ABE8 Base Editors

| ABE8 Base | Adenosine | |
|---|---|---|
| Editor | Deaminase | Adenosine Deaminase Description |
| ABE8.1-m | TadA*8.1 | Monomer_TadA*7.10 + Y147T |
| ABE8.2-m | TadA*8.2 | Monomer_TadA*7.10 + Y147R |
| ABE8.3-m | TadA*8.3 | Monomer_TadA*7.10 + Q154S |
| ABE8.4-m | TadA*8.4 | Monomer_TadA*7.10 + Y123H |
| ABE8.5-m | TadA*8.5 | Monomer_TadA*7.10 + V82S |
| ABE8.6-m | TadA*8.6 | Monomer_TadA*7.10 + T166R |
| ABE8.7-m | TadA*8.7 | Monomer_TadA*7.10 + Q154R |
| ABE8.8-m | TadA*8.8 | Monomer_TadA*7.10 + Y147R_Q154R_Y123H |
| ABE8.9-m | TadA*8.9 | Monomer_TadA*7.10 + Y147R_Q154R_I76Y |
| ABE8.10-m | TadA*8.10 | Monomer_TadA*7.10 + Y147R_Q154R_T166R |
| ABE8.11-m | TadA*8.11 | Monomer_TadA*7.10 + Y147T_Q154R |
| ABE8.12-m | TadA*8.12 | Monomer_TadA*7.10 + Y147T_Q154S |
| ABE8.13-m | TadA*8.13 | Monomer_TadA*7.10 + Y123H_Y147R_Q154R_I76Y |
| ABE8.14-m | TadA*8.14 | Monomer_TadA*7.10 + I76Y_V82S |
| ABE8.15-m | TadA*8.15 | Monomer_TadA*7.10 + V82S_Y147R |
| ABE8.16-m | TadA*8.16 | Monomer_TadA*7.10 + V82S_Y123H_Y147R |
| ABE8.17-m | TadA*8.17 | Monomer_TadA*7.10 + V82S_Q154R |
| ABE8.18-m | TadA*8.18 | Monomer_TadA*7.10 + V82S_Y123H_Q154R |
| ABE8.19-m | TadA*8.19 | Monomer_TadA*7.10 + V82S_Y123H_Y147R_Q154R |
| ABE8.20-m | TadA*8.20 | Monomer_TadA*7.10 + I76Y_V82S_Y123H_Y147R_Q154R |
| ABE8.21-m | TadA*8.21 | Monomer_TadA*7.10 + Y147R_Q154S |
| ABE8.22-m | TadA*8.22 | Monomer_TadA*7.10 + V82S_Q154S |
| ABE8.23-m | TadA*8.23 | Monomer_TadA*7.10 + V82S_Y123H |
| ABE8.24-m | TadA*8.24 | Monomer_TadA*7.10 + V82S_Y123H_Y147T |
| ABE8.1-d | TadA*8.1 | Heterodimer_(WT) + (TadA*7.10 + Y147T) |
| ABE8.2-d | TadA*8.2 | Heterodimer_(WT) + (TadA*7.10 + Y147R) |
| ABE8.3-d | TadA*8.3 | Heterodimer_(WT) + (TadA*7.10 + Q154S) |
| ABE8.4-d | TadA*8.4 | Heterodimer_(WT) + (TadA*7.10 + Y123H) |
| ABE8.5-d | TadA*8.5 | Heterodimer_(WT) + (TadA*7.10 + V82S) |
| ABE8.6-d | TadA*8.6 | Heterodimer_(WT) + (TadA*7.10 + T166R) |
| ABE8.7-d | TadA*8.7 | Heterodimer_(WT) + (TadA*7.10 + Q154R) |
| ABE8.8-d | TadA*8.8 | Heterodimer_(WT) + (TadA*7.10 + Y147R_Q154R_Y123H) |
| ABE8.9-d | TadA*8.9 | Heterodimer_(WT) + (TadA*7.10 + Y147R_Q154R_I76Y) |
| ABE8.10-d | TadA*8.10 | Heterodimer_(WT) + (TadA*7.10 + Y147R_Q154R_T166R) |
| ABE8.11-d | TadA*8.11 | Heterodimer_(WT) + (TadA*7.10 + Y147T_Q154R) |
| ABE8.12-d | TadA*8.12 | Heterodimer_(WT) + (TadA*7.10 + Y147T_Q154S) |
| ABE8.13-d | TadA*8.13 | Heterodimer_(WT) + (TadA*7.10 + Y123H_Y147T_Q154R_I76Y) |
| ABE8.14-d | TadA*8.14 | Heterodimer_(WT) + (TadA*7.10 + I76Y_V82S) |
| ABE8.15-d | TadA*8.15 | Heterodimer_(WT) + (TadA*7.10 + V82S_Y147R) |
| ABE8.16-d | TadA*8.16 | Heterodimer_(WT) + (TadA*7.10 + V82S_Y123H_Y147R) |
| ABE8.17-d | TadA*8.17 | Heterodimer_(WT) + (TadA*7.10 + V82S_Q154R) |
| ABE8.18-d | TadA*8.18 | Heterodimer_(WT) + (TadA*7.10 + V82S_Y123H_Q154R) |
| ABE8.19-d | TadA*8.19 | Heterodimer_(WT) + (TadA*7.10 + V82S_Y123H_Y147R_Q154R) |
| ABE8.20-d | TadA*8.20 | Heterodimer_(WT) + (TadA*7.10 + I76Y_V82S_Y123H_Y147R_Q154R) |
| ABE8.21-d | TadA*8.21 | Heterodimer_(WT) + (TadA*7.10 + Y147R_Q154S) |
| ABE8.22-d | TadA*8.22 | Heterodimer_(WT) + (TadA*7.10 + V82S_Q154S) |
| ABE8.23-d | TadA*8.23 | Heterodimer_(WT) + (TadA*7.10 + V82S_Y123H) |
| ABE8.24-d | TadA*8.24 | Heterodimer_(WT) + (TadA*7.10 + V82S_Y123H_Y147T) |

[0643] In some embodiments, base editors (e.g., ABE8) are generated by cloning an adenosine deaminase variant (e.g., TadA*8) into a scaffold that includes a circular permutant Cas9 (e.g., CP5 or CP6) and a bipartite nuclear localization sequence. In some embodiments, the base editor (e.g., ABE7.9, ABE7.10, or ABE8) is an NGC PAM CP5 variant (S. pyrogenes Cas9 or spVRQR Cas9). In some embodiments, the base editor (e.g., ABE7.9, ABE7.10, or ABE8) is an AGA PAM CP5 variant (S. pyrogenes Cas9 or spVRQR Cas9). In some embodiments, the base editor (e.g., ABE7.9, ABE7.10, or ABE8) is an NGC PAM CP6 variant (S. pyrogenes Cas9 or spVRQR Cas9). In some embodiments, the base editor (e.g. ABE7.9, ABE7.10, or ABE8) is an AGA PAM CP6 variant (S. pyrogenes Cas9 or spVRQR Cas9).

[0644] In some embodiments, the ABE has a genotype as shown in Table 8 below.

TABLE 8
Genotypes of ABEs

| | 23 | 26 | 36 | 37 | 48 | 49 | 51 | 72 | 84 | 87 | 105 | 108 | 123 | 125 | 142 | 145 | 147 | 152 | 155 | 156 | 157 | 161 |
|---|---|---|---|---|---|---|---|---|---|---|---|---|---|---|---|---|---|---|---|---|---|---|
| ABE7.9 | L | R | L | N | A | | L | N | F | S | V | N | Y | G | N | C | Y | P | V | F | N | K |
| ABE7.10 | R | R | L | N | A | | L | N | F | S | V | N | Y | G | A | C | Y | P | V | F | N | K |

[0645] As shown in Table 9 below, genotypes of 40 ABE8s are described. Residue positions in the evolved E. coli TadA portion of ABE are indicated. Mutational changes in ABE8 are shown when distinct from ABE7.10 mutations. In some embodiments, the ABE has a genotype of one of the ABEs as shown in Table 9 below.

TABLE 9
Residue Identity in Evolved TadA

| | 23 | 36 | 48 | 51 | 76 | 82 | 84 | 106 | 108 | 123 | 146 | 147 | 152 | 154 | 155 | 156 | 157 | 166 |
|---|---|---|---|---|---|---|---|---|---|---|---|---|---|---|---|---|---|---|
| ABE7.10 | R | L | A | L | I | V | F | V | N | Y | C | Y | P | Q | V | F | N | T |
| ABE8.1-m | | | | | | | | | | | | T | | | | | | |
| ABE8.2-m | | | | | | | | | | | | R | | | | | | |
| ABE8.3-m | | | | | | | | | | | | | | S | | | | |
| ABE8.4-m | | | | | | | | | | H | | | | | | | | |
| ABE8.5-m | | | | | | S | | | | | | | | | | | | |
| ABE8.6-m | | | | | | | | | | | | | | | | | | R |
| ABE8.7-m | | | | | | | | | | | | | | R | | | | |
| ABE8.8-m | | | | | | | | | | H | | R | | R | | | | |
| ABE8.9-m | | | | | Y | | | | | | | R | | R | | | | |
| ABE8.10-m | | | | | | | | | | | | R | | R | | | | R |
| ABE8.11-m | | | | | | | | | | | | T | | R | | | | |
| ABE8.12-m | | | | | | | | | | | | T | | S | | | | |
| ABE8.13-m | | | | | Y | | | | | H | | R | | R | | | | |
| ABE8.14-m | | | | | Y | S | | | | | | | | | | | | |
| ABE8.15-m | | | | | | S | | | | | | R | | | | | | |
| ABE8.16-m | | | | | | S | | | | H | | R | | | | | | |
| ABE8.17-m | | | | | | S | | | | | | | | R | | | | |
| ABE8.18-m | | | | | | S | | | | H | | | | R | | | | |
| ABE8.19-m | | | | | | S | | | | H | | R | | R | | | | |
| ABE8.20-m | | | | | Y | S | | | | H | | R | | R | | | | |
| ABE8.21-m | | | | | | | | | | | | R | | S | | | | |
| ABE8.22-m | | | | | | S | | | | | | | | S | | | | |
| ABE8.23-m | | | | | | S | | | | H | | | | | | | | |
| ABE8.24-m | | | | | | S | | | | H | | T | | | | | | |
| ABE8.1-d | | | | | | | | | | | | T | | | | | | |
| ABE8.2-d | | | | | | | | | | | | R | | | | | | |
| ABE8.3-d | | | | | | | | | | | | | | S | | | | |
| ABE8.4-d | | | | | | | | | | H | | | | | | | | |
| ABE8.5-d | | | | | | S | | | | | | | | | | | | |
| ABE8.6-d | | | | | | | | | | | | | | | | | | R |
| ABE8.7-d | | | | | | | | | | | | | | R | | | | |
| ABE8.8-d | | | | | | | | | | H | | R | | R | | | | |
| ABE8.9-d | | | | | Y | | | | | | | R | | R | | | | |
| ABE8.10-d | | | | | | | | | | | | R | | R | | | | R |
| ABE8.11-d | | | | | | | | | | | | T | | R | | | | |
| ABE8.12-d | | | | | | | | | | | | T | | S | | | | |
| ABE8.13-d | | | | | Y | | | | | H | | R | | R | | | | |
| ABE8.14-d | | | | | Y | S | | | | | | | | | | | | |
| ABE8.15-d | | | | | | S | | | | | | R | | | | | | |
| ABE8.16-d | | | | | | S | | | | H | | R | | | | | | |
| ABE8.17-d | | | | | | S | | | | | | | | R | | | | |
| ABE8.18-d | | | | | | S | | | | H | | | | R | | | | |
| ABE8.19-d | | | | | | S | | | | H | | R | | R | | | | |
| ABE8.20-d | | | | | Y | S | | | | H | | R | | R | | | | |
| ABE8.21-d | | | | | | | | | | | | R | | S | | | | |
| ABE8.22-d | | | | | | S | | | | | | | | S | | | | |
| ABE8.23-d | | | | | | S | | | | H | | | | | | | | |
| ABE8.24-d | | | | | | S | | | | H | | T | | | | | | |

[0646] In some embodiments, the base editor is ABE8.1, which comprises or consists essentially of the following sequence or a fragment thereof having adenosine deaminase activity:

ABE8.1_Y147T_CP5_NGC PAM_monomer
(SEQ ID NO: 254)
MSEVEFSHEYWMRHALTLAKRARDEREVPVGAVLVLNNRVIGEGWNRAIGLHDPTAHAEIMA
LRQGGLVMQNYRLIDATLYVTFEPCVMCAGAMIHSRIGRVVFGVRNAKTGAAGSLMDVLHYP
GMNHRVEITEGILADECAALLCTFFRMPRQVFNAQKKAQSSTD [symbol] [symbol] [symbol]
EIGKATAKYFFYSNIMNFFKTEITLANGEIRKRPLIETNGETGEIVWDK
GRDFATVRKVLSMPQVNIVKKTEVQTGGFSKESILPKRNSDKLIARKKDWDPKKYGGFMQPT
VAYSVLVVAKVEKGKSKKLKSVKELLGITIMERSSFEKNPIDFLEAKGYKEVKKDLIIKLPK
YSLFELENGRKRMLASAKFLQKGNELALPSKYVNFLYLASHYEKLKGSPEDNEQKQLFVEQH
KHYLDEIIEQISEFSKRVILADANLDKVLSAYNKHRDKPIREQAENIIHLFTLTNLGAPRAF
KYFDTTIARKEYRSTKEVLDATLIHQSITGLYETRIDLSQLGGD [symbol] [symbol]
DKKYSIGLAIGTNSVGWAVITDEYKVPSKKFKVLGNTDRHSIKKNLIGALLFDSGETAE
ATRLKRTARRRYTRRKNRICYLQEIFSNEMAKVDDSFFHRLEESFLVEEDKKHERHPIFGNI
VDEVAYHEKYPTIYHLRKKLVDSTDKADLRLIYLALAHMIKFRGHFLIEGDLNPDNSDVDKL
FIQLVQTYNQLFEENPINASGVDAKAILSARLSKSRRLENLIAQLPGEKKNGLFGNLIALSL
GLTPNFKSNFDLAEDAKLQLSKDTYDDDLDNLLAQIGDQYADLFLAAKNLSDAILLSDILRV
NTEITKAPLSASMIKRYDEHHQDLTLLKALVRQQLPEKYKEIFFDQSKNGYAGYIDGGASQE
EFYKFIKPILEKMDGTEELLVKLNREDLLRKQRTFDNGSIPHQIHLGELHAILRRQEDFYPF
LKDNREKIEKILTFRIPYYVGPLARGNSRFAWMTRKSEETITPWNFEEVVDKGASAQSFIER
MTNFDKNLPNEKVLPKHSLLYEYFTVYNELTKVKYVTEGMRKPAFLSGEQKKAIVDLLFKTN
RKVTVKQLKEDYFKKIECFDSVEISGVEDRFNASLGTYHDLLKIIKDKDFLDNEENEDILED
IVLTLTLFEDREMIEERLKTYAHLFDDKVMKQLKRRRYTGWGRLSRKLINGIRDKQSGKTIL
DFLKSDGFANRNFMQLIHDDSLTFKEDIQKAQVSGQGDSLHEHIANLAGSPAIKKGILQTVK
VVDELVKVMGRHKPENIVIEMARENQTTQKGQKNSRERMKRIEEGIKELGSQILKEHPVENT
QLQNEKLYLYYLQNGRDMYVDQELDINRLSDYDVDHIVPQSFLKDDSIDNKVLTRSDKNRGK
SDNVPSEEVVKKMKNYWRQLLNAKLITQRKFDNLTKAERGGLSELDKAGFIKRQLVETRQIT
KHVAQILDSRMNTKYDENDKLIREVKVITLKSKLVSDFRKDFQFYKVREINNYHHAHDAYLN
AVVGTALIKKYPKLESEFVYGDYKVYDVRKMIAKSEQEGADKRTADGSEFESPKKKRKV*

[0647] In the above sequence, the plain text denotes an adenosine deaminase sequence, bold sequence indicates sequence derived from Cas9, the italics sequence denotes a linker sequence, and the underlined sequence denotes a bipartite nuclear localization sequence.

[0648] In some embodiments, the base editor is ABE8.1, which comprises or consists essentially of the following sequence or a fragment thereof having adenosine deaminase activity:

pNMG-B335 ABE8.1Y147T_CP5_NGC PAM monomer
(SEQ ID NO: 254)
MSEVEFSHEYWMRHALTLAKRARDEREVPVGAVLVLNNRVIGEGWNRAIGLHDPTAHAEIMA
LRQGGLVMQNYRLIDATLYVTFEPCVMCAGAMIHSRIGRVVFGVRNAKTGAAGSLMDVLHYP
GMNHRVEITEGILADECAALLCTFFRMPRQVFNAQKKAQSSTDSGGSSGGSSGSETPGTSES
ATPESSGGSSGGSEIGKATAKYFFYSNIMNFFKTEITLANGEIRKRPLIETNGETGEIVWDK
GRDFATVRKVLSMPQVNIVKKTEVQTGGFSKESILPKRNSDKLIARKKDWDPKKYGGFMQPT
VAYSVLVVAKVEKGKSKKLKSVKELLGITIMERSSFEKNPIDFLEAKGYKEVKKDLIIKLPK
YSLFELENGRKRMLASAKFLQKGNELALPSKYVNFLYLASHYEKLKGSPEDNEQKQLFVEQH
KHYLDEIIEQISEFSKRVILADANLDKVLSAYNKHRDKPIREQAENIIHLFTLTNLGAPRAF
KYFDTTIARKEYRSTKEVLDATLIHQSITGLYETRIDLSQLGGDGGSGGSGGSGGSGGSGGS
GGMDKKYSIGLAIGTNSVGWAVITDEYKVPSKKFKVLGNTDRHSIKKNLIGALLFDSGETAE
ATRLKRTARRRYTRRKNRICYLQEIFSNEMAKVDDSFFHRLEESFLVEEDKKHERHPIFGNI
VDEVAYHEKYPTIYHLRKKLVDSTDKADLRLIYLALAHMIKFRGHFLIEGDLNPDNSDVDKL
FIQLVQTYNQLFEENPINASGVDAKAILSARLSKSRRLENLIAQLPGEKKNGLFGNLIALSL
GLTPNFKSNFDLAEDAKLQLSKDTYDDDLDNLLAQIGDQYADLFLAAKNLSDAILLSDILRV
NTEITKAPLSASMIKRYDEHHQDLTLLKALVRQQLPEKYKEIFFDQSKNGYAGYIDGGASQE
EFYKFIKPILEKMDGTEELLVKLNREDLLRKQRTFDNGSIPHQIHLGELHAILRRQEDFYPF
LKDNREKIEKILTFRIPYYVGPLARGNSRFAWMTRKSEETITPWNFEEVVDKGASAQSFIER
MTNFDKNLPNEKVLPKHSLLYEYFTVYNELTKVKYVTEGMRKPAFLSGEQKKAIVDLLFKTN
RKVTVKQLKEDYFKKIECFDSVEISGVEDRFNASLGTYHDLLKIIKDKDFLDNEENEDILED
IVLTLTLFEDREMIEERLKTYAHLFDDKVMKQLKRRRYTGWGRLSRKLINGIRDKQSGKTIL
DFLKSDGFANRNFMQLIHDDSLTFKEDIQKAQVSGQGDSLHEHIANLAGSPAIKKGILQTVK
VVDELVKVMGRHKPENIVIEMARENQTTQKGQKNSRERMKRIEEGIKELGSQILKEHPVENT
QLQNEKLYLYYLQNGRDMYVDQELDINRLSDYDVDHIVPQSFLKDDSIDNKVLTRSDKNRGK
SDNVPSEEVVKKMKNYWRQLLNAKLITQRKFDNLTKAERGGLSELDKAGFIKRQLVETRQIT
KHVAQILDSRMNTKYDENDKLIREVKVITLKSKLVSDFRKDFQFYKVREINNYHHAHDAYLN
AVVGTALIKKYPKLESEFVYGDYKVYDVRKMIAKSEQEGADKRTADGSEFESPKKKRKV*

[0649] In the above sequence, the plain text denotes an adenosine deaminase sequence, bold sequence indicates sequence derived from Cas9, the italics sequence denotes a linker sequence, and the underlined sequence denotes a bipartite nuclear localization sequence.

[0650] In some embodiments, the base editor is ABE8.14, which comprises or consists essentially of the following sequence or a fragment thereof having adenosine deaminase activity:

pNMG-357_ABE8.14 with NGC PAM CP5
(SEQ ID NO: 255)
MSEVEFSHEYWMRHALTLAKRAWDEREVPVGAVLVHNNRVIGEGWNRPIGRHDPTAHAEIMA
LRQGGLVMQNYRLIDATLYVTLEPCVMCAGAMIHSRIGRVVFGARDAKTGAAGSLMDVLHHP
GMNHRVEITEGILADECAALLSDFFRMRRQEIKAQKKAQSSTDGGSSGGSSGSETPGTSESA
TPESSGGSSGGSMSEVEFSHEYWMRHALTLAKRARDEREVPVGAVLVLNNRVIGEGWNRAIG
LHDPTAHAEIMALRQGGLVMQNYRLIDATLYVTFEPCVMCAGAMIHSRIGRVVFGVRNAKTG
AAGSLMDVLHYPGMNHRVEITEGILADECAALLCTFFRMPRQVFNAQKKAQSSTDSGGSSGG
SSGSETPGTSESATPESSGGSSGGSEIGKATAKYFFYSNIMNFFKTEITLANGEIRKRPLIE
TNGETGEIVWDKGRDFATVRKVLSMPQVNIVKKTEVQTGGFSKESILPKRNSDKLIARKKDW
DPKKYGGFMQPTVAYSVLVVAKVEKGKSKKLKSVKELLGITIMERSSFEKNPIDFLEAKGYK
EVKKDLIIKLPKYSLFELENGRKRMLASAKFLQKGNELALPSKYVNFLYLASHYEKLKGSPE
DNEQKQLFVEQHKHYLDEIIEQISEFSKRVILADANLDKVLSAYNKHRDKPIREQAENIIHL
FTLTNLGAPRAFKYFDTTIARKEYRSTKEVLDATLIHQSITGLYETRIDLSQLGGDGGSGGS
GGSGGSGGSGGSGGMDKKYSIGLAIGTNSVGWAVITDEYKVPSKKFKVLGNTDRHSIKKNLI
GALLFDSGETAEATRLKRTARRRYTRRKNRICYLQEIFSNEMAKVDDSFFHRLEESFLVEED
KKHERHPIFGNIVDEVAYHEKYPTIYHLRKKLVDSTDKADLRLIYLALAHMIKFRGHFLIEG
DLNPDNSDVDKLFIQLVQTYNQLFEENPINASGVDAKAILSARLSKSRRLENLIAQLPGEKK
NGLFGNLIALSLGLTPNFKSNFDLAEDAKLQLSKDTYDDDLDNLLAQIGDQYADLFLAAKNL
SDAILLSDILRVNTEITKAPLSASMIKRYDEHHQDLTLLKALVRQQLPEKYKEIFFDQSKNG
YAGYIDGGASQEEFYKFIKPILEKMDGTEELLVKLNREDLLRKQRTFDNGSIPHQIHLGELH
AILRRQEDFYPFLKDNREKIEKILTFRIPYYVGPLARGNSRFAWMTRKSEETITPWNFEEVV
DKGASAQSFIERMTNFDKNLPNEKVLPKHSLLYEYFTVYNELTKVKYVTEGMRKPAFLSGEQ
KKAIVDLLFKTNRKVTVKQLKEDYFKKIECFDSVEISGVEDRFNASLGTYHDLLKIIKDKDE
LDNEENEDILEDIVLTLTLFEDREMIEERLKTYAHLFDDKVMKQLKRRRYTGWGRLSRKLIN
GIRDKQSGKTILDFLKSDGFANRNFMQLIHDDSLTFKEDIQKAQVSGQGDSLHEHIANLAGS
PAIKKGILQTVKVVDELVKVMGRHKPENIVIEMARENQTTQKGQKNSRERMKRIEEGIKELG
SQILKEHPVENTQLQNEKLYLYYLQNGRDMYVDQELDINRLSDYDVDHIVPQSFLKDDSIDN
KVLTRSDKNRGKSDNVPSEEVVKKMKNYWRQLLNAKLITQRKFDNLTKAERGGLSELDKAGE
IKRQLVETRQITKHVAQILDSRMNTKYDENDKLIREVKVITLKSKLVSDFRKDFQFYKVREI
NNYHHAHDAYLNAVVGTALIKKYPKLESEFVYGDYKVYDVRKMIAKSEQEGADKRTADGSEF
ESPKKKRKV*

[0651] In the above sequence, the plain text denotes an adenosine deaminase sequence, bold sequence indicates sequence derived from Cas9, the italics sequence denotes a linker sequence, and the underlined sequence denotes a bipartite nuclear localization sequence.

[0652] In some embodiments, the base editor is ABE8.8-m, which comprises or consists essentially of the following sequence or a fragment thereof having adenosine deaminase activity:

ABE8.8-m
(SEQ ID NO: 256)
MSEVEFSHEYWMRHALTLAKRARDEREVPVGAVLV
LNNRVIGEGWNRAIGLHDPTAHAEIMALRQGGLVM
QNYRLIDATLYVTFEPCVMCAGAMIHSRIGRVVFG
VRNAKTGAAGSLMDVLHHPGMNHRVEITEGILADE
CAALLCRFFRMPRRVFNAQKKAQSSTDSGGSSGGS
SGSETPGTSESATPESSGGSSGGSDKKYSIGL AIG
TNSVGWAVITDEYKVPSKKFKVLGNTDRHSIKKNL
IGALLFDSGETAEATRLKRTARRRYTRRKNRICYL
QEIFSNEMAKVDDSFFHRLEESFLVEEDKKHERHP
IFGNIVDEVAYHEKYPTIYHLRKKLVDSTDKADLR
LIYLALAHMIKFRGHFLIEGDLNPDNSDVDKLFIQ
LVQTYNQLFEENPINASGVDAKAILSARLSKSRRL
ENLIAQLPGEKKNGLFGNLIALSLGLTPNFKSNFD
LAEDAKLQLSKDTYDDDLDNLLAQIGDQYADLFLA
AKNLSDAILLSDILRVNTEITKAPLSASMIKRYDE
HHQDLTLLKALVRQQLPEKYKEIFFDQSKNGYAGY
IDGGASQEEFYKFIKPILEKMDGTEELLVKLNRED
LLRKQRTFDNGSIPHQIHLGELHAILRRQEDFYPF
LKDNREKIEKILTFRIPYYVGPLARGNSRFAWMTR
KSEETITPWNFEEVVDKGASAQSFIERMTNFDKNL
PNEKVLPKHSLLYEYFTVYNELTKVKYVTEGMRKP
AFLSGEQKKAIVDLLFKTNRKVTVKQLKEDYFKKI
ECFDSVEISGVEDRFNASLGTYHDLLKIIKDKDFL
DNEENEDILEDIVLTLTLFEDREMIEERLKTYAHL
FDDKVMKQLKRRRYTGWGRLSRKLINGIRDKQSGK
TILDFLKSDGFANRNFMQLIHDDSLTFKEDIQKAQ
VSGQGDSLHEHIANLAGSPAIKKGILQTVKVVDEL
VKVMGRHKPENIVIEMARENQTTQKGQKNSRERMK
RIEEGIKELGSQILKEHPVENTQLQNEKLYLYYLQ
NGRDMYVDQELDINRLSDYDVDHIVPQSFLKDDSI
DNKVLTRSDKNRGKSDNVPSEEVVKKMKNYWRQLL
NAKLITQRKFDNLTKAERGGLSELDKAGFIKRQLV
ETRQITKHVAQILDSRMNTKYDENDKLIREVKVIT
LKSKLVSDFRKDFQFYKVREINNYHHAHDAYLNAV
VGTALIKKYPKLESEFVYGDYKVYDVRKMIAKSEQ
EIGKATAKYFFYSNIMNFFKTEITLANGEIRKRPL
IETNGETGEIVWDKGRDFATVRKVLSMPQVNIVKK
TEVQTGGFSKESILPKRNSDKLIARKKDWDPKKYG
GFDSPTVAYSVLVVAKVEKGKSKKLKSVKELLGIT
IMERSSFEKNPIDFLEAKGYKEVKKDLIIKLPKYS
LFELENGRKRMLASAGELQKGNELALPSKYVNFLY
LASHYEKLKGSPEDNEQKQLFVEQHKHYLDEIIEQ
ISEFSKRVILADANLDKVLSAYNKHRDKPIREQAE
NIIHLFTLTNLGAPAAFKYFDTTIDRKRYTSTKEV
LDATLIHQSITGLYETRIDLSQLGGDEGADKRTAD
GSEFESPKKKRKV*

[0653] In the above sequence, the plain text denotes an adenosine deaminase sequence, bold sequence indicates sequence derived from Cas9, the italicized sequence denotes a linker sequence, underlined sequence denotes a bipartite nuclear localization sequence, and double underlined sequence indicates mutations.

[0654] In some embodiments, the base editor is ABE8.8-d, which comprises or consists essentially of the following sequence or a fragment thereof having adenosine deaminase activity:

ABE.-d
(SEQ ID NO: 257)
MSEVEFSHEYWMRHALTLAKRAWDEREVPVGAVLVHNNRVIGEGWNRPIGRHDPTAHAEIMA
LRQGGLVMQNYRLIDATLYVTLEPCVMCAGAMIHSRIGRVVFGARDAKTGAAGSLMDVLHHP
GMNHRVEITEGILADECAALLSDFFRMRRQEIKAQKKAQSSTDSGGSSGGSSGSETPGTSES
ATPESSGGSSGGSSEVEFSHEYWMRHALTLAKRARDEREVPVGAVLVLNNRVIGEGWNRAIG
LHDPTAHAEIMALRQGGLVMQNYRLIDATLYVTFEPCVMCAGAMIHSRIGRVVFGVRNAKTG
AAGSLMDVLHHPGMNHRVEITEGILADECAALLCRFFRMPRRVFNAQKKAQSSTDSGGSSGG
SSGSETPGTSESATPESSGGSSGGSDKKYSIGLAIGTNSVGWAVITDEYKVPSKKFKVLGNT
DRHSIKKNLIGALLFDSGETAEATRLKRTARRRYTRRKNRICYLQEIFSNEMAKVDDSFFHR
LEESFLVEEDKKHERHPIFGNIVDEVAYHEKYPTIYHLRKKLVDSTDKADLRLIYLALAHMI
KFRGHFLIEGDLNPDNSDVDKLFIQLVQTYNQLFEENPINASGVDAKAILSARLSKSRRLEN
LIAQLPGEKKNGLFGNLIALSLGLTPNFKSNFDLAEDAKLQLSKDTYDDDLDNLLAQIGDQY
ADLFLAAKNLSDAILLSDILRVNTEITKAPLSASMIKRYDEHHQDLTLLKALVRQQLPEKYK
EIFFDQSKNGYAGYIDGGASQEEFYKFIKPILEKMDGTEELLVKLNREDLLRKQRTFDNGSI
PHQIHLGELHAILRRQEDFYPFLKDNREKIEKILTFRIPYYVGPLARGNSRFAWMTRKSEET
ITPWNFEEVVDKGASAQSFIERMTNFDKNLPNEKVLPKHSLLYEYFTVYNELTKVKYVTEGM
RKPAFLSGEQKKAIVDLLFKTNRKVTVKQLKEDYFKKIECFDSVEISGVEDRFNASLGTYHD
LLKIIKDKDFLDNEENEDILEDIVLTLTLFEDREMIEERLKTYAHLFDDKVMKQLKRRRYTG
WGRLSRKLINGIRDKQSGKTILDFLKSDGFANRNFMQLIHDDSLTFKEDIQKAQVSGQGDSL
HEHIANLAGSPAIKKGILQTVKVVDELVKVMGRHKPENIVIEMARENQTTQKGQKNSRERMK
RIEEGIKELGSQILKEHPVENTQLQNEKLYLYYLQNGRDMYVDQELDINRLSDYDVDHIVPQ
SFLKDDSIDNKVLTRSDKNRGKSDNVPSEEVVKKMKNYWRQLLNAKLITQRKFDNLTKAERG
GLSELDKAGFIKRQLVETRQITKHVAQILDSRMNTKYDENDKLIREVKVITLKSKLVSDFRK
DFQFYKVREINNYHHAHDAYLNAVVGTALIKKYPKLESEFVYGDYKVYDVRKMIAKSEQEIG
KATAKYFFYSNIMNFFKTEITLANGEIRKRPLIETNGETGEIVWDKGRDFATVRKVLSMPQV
NIVKKTEVQTGGFSKESILPKRNSDKLIARKKDWDPKKYGGFDSPTVAYSVLVVAKVEKGKS
KKLKSVKELLGITIMERSSFEKNPIDFLEAKGYKEVKKDLIIKLPKYSLFELENGRKRMLAS
AGELQKGNELALPSKYVNFLYLASHYEKLKGSPEDNEQKQLFVEQHKHYLDEIIEQISEFSK
RVILADANLDKVLSAYNKHRDKPIREQAENIIHLFTLTNLGAPAAFKYFDTTIDRKRYTSTK
EVLDATLIHQSITGLYETRIDLSQLGGDEGADKRTADGSEFESPKKKRKV*

[0655] In the above sequence, the plain text denotes an adenosine deaminase sequence, bold sequence indicates sequence derived from Cas9, the italicized sequence denotes a linker sequence, underlined sequence denotes a bipartite nuclear localization sequence, and double underlined sequence indicates mutations.

[0656] In some embodiments, the base editor is ABE8.13-m, which comprises or consists essentially of the following sequence or a fragment thereof having adenosine deaminase activity:

ABE8.13-m
(SEQ ID NO: 258)
MSEVEFSHEYWMRHALTLAKRARDEREVPVGAVLVLNNRVIGEGWNRAIGLHDPTAHAEIMA
LRQGGLVMQNYRLYDATLYVTFEPCVMCAGAMIHSRIGRVVFGVRNAKTGAAGSLMDVLHHP
GMNHRVEITEGILADECAALLCRFFRMPRRVFNAQKKAQSSTDSGGSSGGSSGSETPGTSES
ATPESSGGSSGGSDKKYSIGLAIGTNSVGWAVITDEYKVPSKKFKVLGNTDRHSIKKNLIGA
LLFDSGETAEATRLKRTARRRYTRRKNRICYLQEIFSNEMAKVDDSFFHRLEESFLVEEDKK
HERHPIFGNIVDEVAYHEKYPTIYHLRKKLVDSTDKADLRLIYLALAHMIKFRGHFLIEGDL
NPDNSDVDKLFIQLVQTYNQLFEENPINASGVDAKAILSARLSKSRRLENLIAQLPGEKKNG
LFGNLIALSLGLTPNFKSNFDLAEDAKLQLSKDTYDDDLDNLLAQIGDQYADLFLAAKNLSD
AILLSDILRVNTEITKAPLSASMIKRYDEHHQDLTLLKALVRQQLPEKYKEIFFDQSKNGYA
GYIDGGASQEEFYKFIKPILEKMDGTEELLVKLNREDLLRKQRTFDNGSIPHQIHLGELHAI
LRRQEDFYPFLKDNREKIEKILTFRIPYYVGPLARGNSRFAWMTRKSEETITPWNFEEVVDK
GASAQSFIERMTNFDKNLPNEKVLPKHSLLYEYFTVYNELTKVKYVTEGMRKPAFLSGEQKK
AIVDLLFKTNRKVTVKQLKEDYFKKIECFDSVEISGVEDRFNASLGTYHDLLKIIKDKDFLD
NEENEDILEDIVLTLTLFEDREMIEERLKTYAHLFDDKVMKQLKRRRYTGWGRLSRKLINGI
RDKQSGKTILDFLKSDGFANRNFMQLIHDDSLTFKEDIQKAQVSGQGDSLHEHIANLAGSPA
IKKGILQTVKVVDELVKVMGRHKPENIVIEMARENQTTQKGQKNSRERMKRIEEGIKELGSQ
ILKEHPVENTQLQNEKLYLYYLQNGRDMYVDQELDINRLSDYDVDHIVPQSFLKDDSIDNKV
LTRSDKNRGKSDNVPSEEVVKKMKNYWRQLLNAKLITQRKFDNLTKAERGGLSELDKAGFIK
RQLVETRQITKHVAQILDSRMNTKYDENDKLIREVKVITLKSKLVSDFRKDFQFYKVREINN
YHHAHDAYLNAVVGTALIKKYPKLESEFVYGDYKVYDVRKMIAKSEQEIGKATAKYFFYSNI
MNFFKTEITLANGEIRKRPLIETNGETGEIVWDKGRDFATVRKVLSMPQVNIVKKTEVQTGG
FSKESILPKRNSDKLIARKKDWDPKKYGGFDSPTVAYSVLVVAKVEKGKSKKLKSVKELLGI
TIMERSSFEKNPIDFLEAKGYKEVKKDLIIKLPKYSLFELENGRKRMLASAGELQKGNELAL
PSKYVNFLYLASHYEKLKGSPEDNEQKQLFVEQHKHYLDEIIEQISEFSKRVILADANLDKV
LSAYNKHRDKPIREQAENIIHLFTLTNLGAPAAFKYFDTTIDRKRYTSTKEVLDATLIHQSI
TGLYETRIDLSQLGGDEGADKRTADGSEFESPKKKRKV*

[0657] In the above sequence, the plain text denotes an adenosine deaminase sequence, bold sequence indicates sequence derived from Cas9, the italicized sequence denotes a linker sequence, underlined sequence denotes a bipartite nuclear localization sequence, and double underlined sequence indicates mutations.

[0658] In some embodiments, the base editor is ABE8.13-d, which comprises or consists essentially of the following sequence or a fragment thereof having adenosine deaminase activity:

ABE8.13-d
(SEQ ID NO: 259)
MSEVEFSHEYWMRHALTLAKRAWDEREVPVGAVLVHNNRVIGEGWNRPIGRHDPTAHAEIMA
LRQGGLVMQNYRLIDATLYVTLEPCVMCAGAMIHSRIGRVVFGARDAKTGAAGSLMDVLHHP
GMNHRVEITEGILADECAALLSDFFRMRRQEIKAQKKAQSSTDSGGSSGGSSGSETPGTSES
ATPESSGGSSGGSSEVEFSHEYWMRHALTLAKRARDEREVPVGAVLVLNNRVIGEGWNRAIG
LHDPTAHAEIMALRQGGLVMQNYRLYDATLYVTFEPCVMCAGAMIHSRIGRVVFGVRNAKTG
AAGSLMDVLHHPGMNHRVEITEGILADECAALLCRFFRMPRRVFNAQKKAQSSTDSGGSSGG
SSGSETPGTSESATPESSGGSSGGSDKKYSIGLAIGTNSVGWAVITDEYKVPSKKFKVLGNT
DRHSIKKNLIGALLFDSGETAEATRLKRTARRRYTRRKNRICYLQEIFSNEMAKVDDSFFHR
LEESFLVEEDKKHERHPIFGNIVDEVAYHEKYPTIYHLRKKLVDSTDKADLRLIYLALAHMI
KFRGHFLIEGDLNPDNSDVDKLFIQLVQTYNQLFEENPINASGVDAKAILSARLSKSRRLEN
LIAQLPGEKKNGLFGNLIALSLGLTPNFKSNFDLAEDAKLQLSKDTYDDDLDNLLAQIGDQY
ADLFLAAKNLSDAILLSDILRVNTEITKAPLSASMIKRYDEHHQDLTLLKALVRQQLPEKYK
EIFFDQSKNGYAGYIDGGASQEEFYKFIKPILEKMDGTEELLVKLNREDLLRKQRTFDNGSI
PHQIHLGELHAILRRQEDFYPFLKDNREKIEKILTFRIPYYVGPLARGNSRFAWMTRKSEET
ITPWNFEEVVDKGASAQSFIERMTNFDKNLPNEKVLPKHSLLYEYFTVYNELTKVKYVTEGM
RKPAFLSGEQKKAIVDLLFKTNRKVTVKQLKEDYFKKIECFDSVEISGVEDRFNASLGTYHD
LLKIIKDKDFLDNEENEDILEDIVLTLTLFEDREMIEERLKTYAHLFDDKVMKQLKRRRYTG
WGRLSRKLINGIRDKQSGKTILDFLKSDGFANRNFMQLIHDDSLTFKEDIQKAQVSGQGDSL
HEHIANLAGSPAIKKGILQTVKVVDELVKVMGRHKPENIVIEMARENQTTQKGQKNSRERMK
RIEEGIKELGSQILKEHPVENTQLQNEKLYLYYLQNGRDMYVDQELDINRLSDYDVDHIVPQ
SFLKDDSIDNKVLTRSDKNRGKSDNVPSEEVVKKMKNYWRQLLNAKLITQRKFDNLTKAERG
GLSELDKAGFIKRQLVETRQITKHVAQILDSRMNTKYDENDKLIREVKVITLKSKLVSDFRK
DFQFYKVREINNYHHAHDAYLNAVVGTALIKKYPKLESEFVYGDYKVYDVRKMIAKSEQEIG
KATAKYFFYSNIMNFFKTEITLANGEIRKRPLIETNGETGEIVWDKGRDFATVRKVLSMPQV
NIVKKTEVQTGGFSKESILPKRNSDKLIARKKDWDPKKYGGFDSPTVAYSVLVVAKVEKGKS
KKLKSVKELLGITIMERSSFEKNPIDFLEAKGYKEVKKDLIIKLPKYSLFELENGRKRMLAS
AGELQKGNELALPSKYVNFLYLASHYEKLKGSPEDNEQKQLFVEQHKHYLDEIIEQISEFSK
RVILADANLDKVLSAYNKHRDKPIREQAENIIHLFTLTNLGAPAAFKYFDTTIDRKRYTSTK
EVLDATLIHQSITGLYETRIDLSQLGGDEGADKRTADGSEFESPKKKRKV*

[0659] In the above sequence, the plain text denotes an adenosine deaminase sequence, bold sequence indicates sequence derived from Cas9, the italicized sequence denotes a linker sequence, underlined sequence denotes a bipartite nuclear localization sequence, and double underlined sequence indicates mutations.

[0660] In some embodiments, the base editor is ABE8.17-m, which comprises or consists essentially of the following sequence or a fragment thereof having adenosine deaminase activity:

ABE8.17-m
(SEQ ID NO: 260)
MSEVEFSHEYWMRHALTLAKRARDEREVPVGAVLVLNNRVIGEGWNRAIGLHDPTAHAEIMA
LRQGGLVMQNYRLIDATLYSTFEPCVMCAGAMIHSRIGRVVFGVRNAKTGAAGSLMDVLHYP
GMNHRVEITEGILADECAALLCYFFRMPRRVFNAQKKAQSSTDSGGSSGGSSGSETPGTSES
ATPESSGGSSGGSDKKYSIGLAIGTNSVGWAVITDEYKVPSKKFKVLGNTDRHSIKKNLIGA
LLFDSGETAEATRLKRTARRRYTRRKNRICYLQEIFSNEMAKVDDSFFHRLEESFLVEEDKK
HERHPIFGNIVDEVAYHEKYPTIYHLRKKLVDSTDKADLRLIYLALAHMIKFRGHFLIEGDL
NPDNSDVDKLFIQLVQTYNQLFEENPINASGVDAKAILSARLSKSRRLENLIAQLPGEKKNG
LFGNLIALSLGLTPNFKSNFDLAEDAKLQLSKDTYDDDLDNLLAQIGDQYADLFLAAKNLSD
AILLSDILRVNTEITKAPLSASMIKRYDEHHQDLTLLKALVRQQLPEKYKEIFFDQSKNGYA
GYIDGGASQEEFYKFIKPILEKMDGTEELLVKLNREDLLRKQRTFDNGSIPHQIHLGELHAI
LRRQEDFYPFLKDNREKIEKILTFRIPYYVGPLARGNSRFAWMTRKSEETITPWNFEEVVDK
GASAQSFIERMTNFDKNLPNEKVLPKHSLLYEYFTVYNELTKVKYVTEGMRKPAFLSGEQKK
AIVDLLFKTNRKVTVKQLKEDYFKKIECFDSVEISGVEDRFNASLGTYHDLLKIIKDKDFLD
NEENEDILEDIVLTLTLFEDREMIEERLKTYAHLFDDKVMKQLKRRRYTGWGRLSRKLINGI
RDKQSGKTILDFLKSDGFANRNFMQLIHDDSLTFKEDIQKAQVSGQGDSLHEHIANLAGSPA
IKKGILQTVKVVDELVKVMGRHKPENIVIEMARENQTTQKGQKNSRERMKRIEEGIKELGSQ
ILKEHPVENTQLQNEKLYLYYLQNGRDMYVDQELDINRLSDYDVDHIVPQSFLKDDSIDNKV
LTRSDKNRGKSDNVPSEEVVKKMKNYWRQLLNAKLITQRKFDNLTKAERGGLSELDKAGFIK
RQLVETRQITKHVAQILDSRMNTKYDENDKLIREVKVITLKSKLVSDFRKDFQFYKVREINN
YHHAHDAYLNAVVGTALIKKYPKLESEFVYGDYKVYDVRKMIAKSEQEIGKATAKYFFYSNI
MNFFKTEITLANGEIRKRPLIETNGETGEIVWDKGRDFATVRKVLSMPQVNIVKKTEVQTGG
FSKESILPKRNSDKLIARKKDWDPKKYGGFDSPTVAYSVLVVAKVEKGKSKKLKSVKELLGI
TIMERSSFEKNPIDFLEAKGYKEVKKDLIIKLPKYSLFELENGRKRMLASAGELQKGNELAL
PSKYVNFLYLASHYEKLKGSPEDNEQKQLFVEQHKHYLDEIIEQISEFSKRVILADANLDKV
LSAYNKHRDKPIREQAENIIHLFTLTNLGAPAAFKYFDTTIDRKRYTSTKEVLDATLIHQSI
TGLYETRIDLSQLGGDEGADKRTADGSEFESPKKKRKV*

[0661] In the above sequence, the plain text denotes an adenosine deaminase sequence, bold sequence indicates sequence derived from Cas9, the italicized sequence denotes a linker sequence, underlined sequence denotes a bipartite nuclear localization sequence, and double underlined sequence indicates mutations.

[0662] In some embodiments, the base editor is ABE8.17-d, which comprises or consists essentially of the following sequence or a fragment thereof having adenosine deaminase activity:

ABE8.17-d
(SEQ ID NO: 261)
MSEVEFSHEYWMRHALTLAKRAWDEREVPVGAVLVHNNRVIGEGWNRPIGRHDPTAHAEIMA
LRQGGLVMQNYRLIDATLYVTLEPCVMCAGAMIHSRIGRVVFGARDAKTGAAGSLMDVLHHP
GMNHRVEITEGILADECAALLSDFFRMRRQEIKAQKKAQSSTDSGGSSGGSSGSETPGTSES
ATPESSGGSSGGSSEVEFSHEYWMRHALTLAKRARDEREVPVGAVLVLNNRVIGEGWNRAIG
LHDPTAHAEIMALRQGGLVMQNYRLIDATLYSTFEPCVMCAGAMIHSRIGRVVFGVRNAKTG
AAGSLMDVLHYPGMNHRVEITEGILADECAALLCYFFRMPRRVFNAQKKAQSSTDSGGSSGG
SSGSETPGTSESATPESSGGSSGGSDKKYSIGLAIGTNSVGWAVITDEYKVPSKKFKVLGNT
DRHSIKKNLIGALLFDSGETAEATRLKRTARRRYTRRKNRICYLQEIFSNEMAKVDDSFFHR
LEESFLVEEDKKHERHPIFGNIVDEVAYHEKYPTIYHLRKKLVDSTDKADLRLIYLALAHMI
KFRGHFLIEGDLNPDNSDVDKLFIQLVQTYNQLFEENPINASGVDAKAILSARLSKSRRLEN
LIAQLPGEKKNGLFGNLIALSLGLTPNFKSNFDLAEDAKLQLSKDTYDDDLDNLLAQIGDQY
ADLFLAAKNLSDAILLSDILRVNTEITKAPLSASMIKRYDEHHQDLTLLKALVRQQLPEKYK
EIFFDQSKNGYAGYIDGGASQEEFYKFIKPILEKMDGTEELLVKLNREDLLRKQRTFDNGSI
PHQIHLGELHAILRRQEDFYPFLKDNREKIEKILTFRIPYYVGPLARGNSRFAWMTRKSEET
ITPWNFEEVVDKGASAQSFIERMTNFDKNLPNEKVLPKHSLLYEYFTVYNELTKVKYVTEGM
RKPAFLSGEQKKAIVDLLFKTNRKVTVKQLKEDYFKKIECFDSVEISGVEDRFNASLGTYHD
LLKIIKDKDFLDNEENEDILEDIVLTLTLFEDREMIEERLKTYAHLFDDKVMKQLKRRRYTG
WGRLSRKLINGIRDKQSGKTILDFLKSDGFANRNFMQLIHDDSLTFKEDIQKAQVSGQGDSL
HEHIANLAGSPAIKKGILQTVKVVDELVKVMGRHKPENIVIEMARENQTTQKGQKNSRERMK
RIEEGIKELGSQILKEHPVENTQLQNEKLYLYYLQNGRDMYVDQELDINRLSDYDVDHIVPQ
SFLKDDSIDNKVLTRSDKNRGKSDNVPSEEVVKKMKNYWRQLLNAKLITQRKFDNLTKAERG
GLSELDKAGFIKRQLVETRQITKHVAQILDSRMNTKYDENDKLIREVKVITLKSKLVSDFRK
DFQFYKVREINNYHHAHDAYLNAVVGTALIKKYPKLESEFVYGDYKVYDVRKMIAKSEQEIG
KATAKYFFYSNIMNFFKTEITLANGEIRKRPLIETNGETGEIVWDKGRDFATVRKVLSMPQV
NIVKKTEVQTGGFSKESILPKRNSDKLIARKKDWDPKKYGGFDSPTVAYSVLVVAKVEKGKS
KKLKSVKELLGITIMERSSFEKNPIDFLEAKGYKEVKKDL11KLPKYSLFELENGRKRMLAS
AGELQKGNELALPSKYVNFLYLASHYEKLKGSPEDNEQKQLFVEQHKHYLDEIIEQISEFSK
RVILADANLDKVLSAYNKHRDKPIREQAENIIHLFTLTNLGAPAAFKYFDTTIDRKRYTSTK
EVLDATLIHQSITGLYETRIDLSQLGGDEGADKRTADGSEFESPKKKRKV*

[0663] In the above sequence, the plain text denotes an adenosine deaminase sequence, bold sequence indicates sequence derived from Cas9, the italicized sequence denotes a linker sequence, underlined sequence denotes a bipartite nuclear localization sequence, and double underlined sequence indicates mutations.

[0664] In some embodiments, the base editor is ABE8.20-m, which comprises or consists essentially of the following sequence or a fragment thereof having adenosine deaminase activity:

ABE8.20-m
(SEQ ID NO: 262)
MSEVEFSHEYWMRHALTLAKRARDEREVPVGAVLVLNNRVIGEGWNRAIGLHDPTAHAEIMA
LRQGGLVMQNYRLYDATLYSTFEPCVMCAGAMIHSRIGRVVFGVRNAKTGAAGSLMDVLHHP
GMNHRVEITEGILADECAALLCRFFRMPRRVFNAQKKAQSSTDSGGSSGGSSGSETPGTSES
ATPESSGGSSGGSDKKYSIGLAIGTNSVGWAVITDEYKVPSKKFKVLGNTDRHSIKKNLIGA
LLFDSGETAEATRLKRTARRRYTRRKNRICYLQEIFSNEMAKVDDSFFHRLEESFLVEEDKK
HERHPIFGNIVDEVAYHEKYPTIYHLRKKLVDSTDKADLRLIYLALAHMIKFRGHFLIEGDL
NPDNSDVDKLFIQLVQTYNQLFEENPINASGVDAKAILSARLSKSRRLENLIAQLPGEKKNG
LFGNLIALSLGLTPNFKSNFDLAEDAKLQLSKDTYDDDLDNLLAQIGDQYADLFLAAKNLSD
AILLSDILRVNTEITKAPLSASMIKRYDEHHQDLTLLKALVRQQLPEKYKEIFFDQSKNGYA
GYIDGGASQEEFYKFIKPILEKMDGTEELLVKLNREDLLRKQRTFDNGSIPHQIHLGELHAI
LRRQEDFYPFLKDNREKIEKILTFRIPYYVGPLARGNSRFAWMTRKSEETITPWNFEEVVDK
GASAQSFIERMTNFDKNLPNEKVLPKHSLLYEYFTVYNELTKVKYVTEGMRKPAFLSGEQKK
AIVDLLFKTNRKVTVKQLKEDYFKKIECFDSVEISGVEDRFNASLGTYHDLLKIIKDKDFLD
NEENEDILEDIVLTLTLFEDREMIEERLKTYAHLFDDKVMKQLKRRRYTGWGRLSRKLINGI
RDKQSGKTILDFLKSDGFANRNFMQLIHDDSLTFKEDIQKAQVSGQGDSLHEHIANLAGSPA
IKKGILQTVKVVDELVKVMGRHKPENIVIEMARENQTTQKGQKNSRERMKRIEEGIKELGSQ
ILKEHPVENTQLQNEKLYLYYLQNGRDMYVDQELDINRLSDYDVDHIVPQSFLKDDSIDNKV
LTRSDKNRGKSDNVPSEEVVKKMKNYWRQLLNAKLITQRKFDNLTKAERGGLSELDKAGFIK
RQLVETRQITKHVAQILDSRMNTKYDENDKLIREVKVITLKSKLVSDFRKDFQFYKVREINN
YHHAHDAYLNAVVGTALIKKYPKLESEFVYGDYKVYDVRKMIAKSEQEIGKATAKYFFYSNI
MNFFKTEITLANGEIRKRPLIETNGETGEIVWDKGRDFATVRKVLSMPQVNIVKKTEVQTGG
FSKESILPKRNSDKLIARKKDWDPKKYGGFDSPTVAYSVLVVAKVEKGKSKKLKSVKELLGI
TIMERSSFEKNPIDFLEAKGYKEVKKDLIIKLPKYSLFELENGRKRMLASAGELQKGNELAL
PSKYVNFLYLASHYEKLKGSPEDNEQKQLFVEQHKHYLDEIIEQISEFSKRVILADANLDKV
LSAYNKHRDKPIREQAENIIHLFTLTNLGAPAAFKYFDTTIDRKRYTSTKEVLDATLIHQSI
TGLYETRIDLSQLGGDEGADKRTADGSEFESPKKKRKV*

[0665] In the above sequence, the plain text denotes an adenosine deaminase sequence, bold sequence indicates sequence derived from Cas9, the italicized sequence denotes a linker sequence, underlined sequence denotes a bipartite nuclear localization sequence, and double underlined sequence indicates mutations.

[0666] In some embodiments, the base editor is ABE8.20-d, which comprises or consists essentially of the following sequence or a fragment thereof having adenosine deaminase activity:

ABE8.20-d
(SEQ ID NO: 263)
MSEVEFSHEYWMRHALTLAKRAWDEREVPVGAVLVHNNRVIGEGWNRPIGRHDPTAHAEIMA
LRQGGLVMQNYRLIDATLYVTLEPCVMCAGAMIHSRIGRVVFGARDAKTGAAGSLMDVLHHP
GMNHRVEITEGILADECAALLSDFFRMRRQEIKAQKKAQSSTDSGGSSGGSSGSETPGTSES
ATPESSGGSSGGSSEVEFSHEYWMRHALTLAKRARDEREVPVGAVLVLNNRVIGEGWNRAIG
LHDPTAHAEIMALRQGGLVMQNYRLYDATLYSTFEPCVMCAGAMIHSRIGRVVFGVRNAKTG
AAGSLMDVLHHPGMNHRVEITEGILADECAALLCRFFRMPRRVFNAQKKAQSSTDSGGSSGG
SSGSETPGTSESATPESSGGSSGGSDKKYSIGLAIGTNSVGWAVITDEYKVPSKKFKVLGNT
DRHSIKKNLIGALLFDSGETAEATRLKRTARRRYTRRKNRICYLQEIFSNEMAKVDDSFFHR
LEESFLVEEDKKHERHPIFGNIVDEVAYHEKYPTIYHLRKKLVDSTDKADLRLIYLALAHMI
KFRGHFLIEGDLNPDNSDVDKLFIQLVQTYNQLFEENPINASGVDAKAILSARLSKSRRLEN
LIAQLPGEKKNGLFGNLIALSLGLTPNFKSNFDLAEDAKLQLSKDTYDDDLDNLLAQIGDQY
ADLFLAAKNLSDAILLSDILRVNTEITKAPLSASMIKRYDEHHQDLTLLKALVRQQLPEKYK
EIFFDQSKNGYAGYIDGGASQEEFYKFIKPILEKMDGTEELLVKLNREDLLRKQRTFDNGSI
PHQIHLGELHAILRRQEDFYPFLKDNREKIEKILTFRIPYYVGPLARGNSRFAWMTRKSEET
ITPWNFEEVVDKGASAQSFIERMTNFDKNLPNEKVLPKHSLLYEYFTVYNELTKVKYVTEGM
RKPAFLSGEQKKAIVDLLFKTNRKVTVKQLKEDYFKKIECFDSVEISGVEDRFNASLGTYHD
LLKIIKDKDFLDNEENEDILEDIVLTLTLFEDREMIEERLKTYAHLFDDKVMKQLKRRRYTG
WGRLSRKLINGIRDKQSGKTILDFLKSDGFANRNFMQLIHDDSLTFKEDIQKAQVSGQGDSL
HEHIANLAGSPAIKKGILQTVKVVDELVKVMGRHKPENIVIEMARENQTTQKGQKNSRERMK
RIEEGIKELGSQILKEHPVENTQLQNEKLYLYYLQNGRDMYVDQELDINRLSDYDVDHIVPQ
SFLKDDSIDNKVLTRSDKNRGKSDNVPSEEVVKKMKNYWRQLLNAKLITQRKFDNLTKAERG
GLSELDKAGFIKRQLVETRQITKHVAQILDSRMNTKYDENDKLIREVKVITLKSKLVSDFRK
DFQFYKVREINNYHHAHDAYLNAVVGTALIKKYPKLESEFVYGDYKVYDVRKMIAKSEQEIG
KATAKYFFYSNIMNFFKTEITLANGEIRKRPLIETNGETGEIVWDKGRDFATVRKVLSMPQV
NIVKKTEVQTGGFSKESILPKRNSDKLIARKKDWDPKKYGGFDSPTVAYSVLVVAKVEKGKS
KKLKSVKELLGITIMERSSFEKNPIDFLEAKGYKEVKKDL11KLPKYSLFELENGRKRMLAS
AGELQKGNELALPSKYVNFLYLASHYEKLKGSPEDNEQKQLFVEQHKHYLDEIIEQISEFSK
RVILADANLDKVLSAYNKHRDKPIREQAENIIHLFTLTNLGAPAAFKYFDTTIDRKRYTSTK
EVLDATLIHQSITGLYETRIDLSQLGGDEGADKRTADGSEFESPKKKRRKV*

[0667] In the above sequence, the plain text denotes an adenosine deaminase sequence, bold sequence indicates sequence derived from Cas9, the italicized sequence denotes a linker sequence, underlined sequence denotes a bipartite nuclear localization sequence, and double underlined sequence indicates mutations.

[0668] In some embodiments, an ABE8 of the invention is selected from the following sequences:

01. monoABE8.1_bpNLS + Y147T
(SEQ ID NO: 264)
MSEVEFSHEYWMRHALTLAKRARDEREVPVGAVLVLNNRV
IGEGWNRAIGLHDPTAHAEIMALRQGGLVMQNYRLIDATL
YVTFEPCVMCAGAMIHSRIGRVVFGVRNAKTGAAGSLMDV
LHYPGMNHRVEITEGILADECAALLCTFFRMPRQVFNAQK
KAQSSTDSGGSSGGSSGSETPGTSESATPESSGGSSGGSD
KKYSIGLAIGTNSVGWAVITDEYKVPSKKFKVLGNTDRHS
IKKNLIGALLFDSGETAEATRLKRTARRRYTRRKNRICYL
QEIFSNEMAKVDDSFFHRLEESFLVEEDKKHERHPIFGNI
VDEVAYHEKYPTIYHLRKKLVDSTDKADLRLIYLALAHMI
KFRGHFLIEGDLNPDNSDVDKLFIQLVQTYNQLFEENPIN
ASGVDAKAILSARLSKSRRLENLIAQLPGEKKNGLFGNLI
ALSLGLTPNFKSNFDLAEDAKLQLSKDTYDDDLDNLLAQI
GDQYADLFLAAKNLSDAILLSDILRVNTEITKAPLSASMI
KRYDEHHQDLTLLKALVRQQLPEKYKEIFFDQSKNGYAGY
IDGGASQEEFYKFIKPILEKMDGTEELLVKLNREDLLRKQ
RTFDNGSIPHQIHLGELHAILRRQEDFYPFLKDNREKIEK
ILTFRIPYYVGPLARGNSRFAWMTRKSEETITPWNFEEVV
DKGASAQSFIERMTNFDKNLPNEKVLPKHSLLYEYFTVYN
ELTKVKYVTEGMRKPAFLSGEQKKAIVDLLFKTNRKVTVK
QLKEDYFKKIECFDSVEISGVEDRFNASLGTYHDLLKIIK
DKDFLDNEENEDILEDIVLTLTLFEDREMIEERLKTYAHL
FDDKVMKQLKRRRYTGWGRLSRKLINGIRDKQSGKTILDF
LKSDGFANRNFMQLIHDDSLTFKEDIQKAQVSGQGDSLHE
HIANLAGSPAIKKGILQTVKVVDELVKVMGRHKPENIVIE
MARENQTTQKGQKNSRERMKRIEEGIKELGSQILKEHPVE
NTQLQNEKLYLYYLQNGRDMYVDQELDINRLSDYDVDHIV
PQSFLKDDSIDNKVLTRSDKNRGKSDNVPSEEVVKKMKNY
WRQLLNAKLITQRKFDNLTKAERGGLSELDKAGFIKRQLV
ETRQITKHVAQILDSRMNTKYDENDKLIREVKVITLKSKL
VSDFRKDFQFYKVREINNYHHAHDAYLNAVVGTALIKKYP
KLESEFVYGDYKVYDVRKMIAKSEQEIGKATAKYFFYSNI
MNFFKTEITLANGEIRKRPLIETNGETGEIVWDKGRDFAT
VRKVLSMPQVNIVKKTEVQTGGFSKESILPKRNSDKLIAR
KKDWDPKKYGGFVSPTVAYSVLVVAKVEKGKSKKLKSVKE
LLGITIMERSSFEKNPIDFLEAKGYKEVKKDLIIKLPKYS
LFELENGRKRMLASARELQKGNELALPSKYVNFLYLASHY
EKLKGSPEDNEQKQLFVEQHKHYLDEIIEQISEFSKRVIL
ADANLDKVLSAYNKHRDKPIREQAENIIHLFTLTNLGAPA
AFKYFDTTIDRKQYRSTKEVLDATLIHQSITGLYETRIDL
SQLGGDEGADKRTADGSEFESPKKKRKV
02. monoABE8.1_bpNLS + Y147R
(SEQ ID NO: 265)
MSEVEFSHEYWMRHALTLAKRARDEREVPVGAVLVLNNRV
IGEGWNRAIGLHDPTAHAEIMALRQGGLVMQNYRLIDATL
YVTFEPCVMCAGAMIHSRIGRVVFGVRNAKTGAAGSLMDV
LHYPGMNHRVEITEGILADECAALLCRFFRMPRQVFNAQK
KAQSSTDSGGSSGGSSGSETPGTSESATPESSGGSSGGSD
KKYSIGLAIGTNSVGWAVITDEYKVPSKKFKVLGNTDRHS
IKKNLIGALLFDSGETAEATRLKRTARRRYTRRKNRICYL
QEIFSNEMAKVDDSFFHRLEESFLVEEDKKHERHPIFGNI
VDEVAYHEKYPTIYHLRKKLVDSTDKADLRLIYLALAHMI
KFRGHFLIEGDLNPDNSDVDKLEIQLVQTYNQLFEENPIN
ASGVDAKAILSARLSKSRRLENLIAQLPGEKKNGLFGNLI
ALSLGLTPNFKSNFDLAEDAKLQLSKDTYDDDLDNLLAQI
GDQYADLFLAAKNLSDAILLSDILRVNTEITKAPLSASMI
KRYDEHHQDLTLLKALVRQQLPEKYKEIFFDQSKNGYAGY
IDGGASQEEFYKFIKPILEKMDGTEELLVKLNREDLLRKQ
RTFDNGSIPHQIHLGELHAILRRQEDFYPFLKDNREKIEK
ILTFRIPYYVGPLARGNSRFAWMTRKSEETITPWNFEEVV
DKGASAQSFIERMTNFDKNLPNEKVLPKHSLLYEYFTVYN
ELTKVKYVTEGMRKPAFLSGEQKKAIVDLLFKTNRKVTVK
QLKEDYFKKIECFDSVEISGVEDRFNASLGTYHDLLKIIK
DKDFLDNEENEDILEDIVLTLTLFEDREMIEERLKTYAHL
FDDKVMKQLKRRRYTGWGRLSRKLINGIRDKQSGKTILDF
LKSDGFANRNFMQLIHDDSLTFKEDIQKAQVSGQGDSLHE
HIANLAGSPAIKKGILQTVKVVDELVKVMGRHKPENIVIE
MARENQTTQKGQKNSRERMKRIEEGIKELGSQILKEHPVE
NTQLQNEKLYLYYLQNGRDMYVDQELDINRLSDYDVDHIV
PQSFLKDDSIDNKVLTRSDKNRGKSDNVPSEEVVKKMKNY
WRQLLNAKLITQRKFDNLTKAERGGLSELDKAGFIKRQLV
ETRQITKHVAQILDSRMNTKYDENDKLIREVKVITLKSKL
VSDFRKDFQFYKVREINNYHHAHDAYLNAVVGTALIKKYP
KLESEFVYGDYKVYDVRKMIAKSEQEIGKATAKYFFYSNI
MNFFKTEITLANGEIRKRPLIETNGETGEIVWDKGRDFAT
VRKVLSMPQVNIVKKTEVQTGGFSKESILPKRNSDKLIAR
KKDWDPKKYGGFVSPTVAYSVLVVAKVEKGKSKKLKSVKE
LLGITIMERSSFEKNPIDFLEAKGYKEVKKDLIIKLPKYS
LFELENGRKRMLASARELQKGNELALPSKYVNFLYLASHY
EKLKGSPEDNEQKQLFVEQHKHYLDEIIEQISEFSKRVIL
ADANLDKVLSAYNKHRDKPIREQAENIIHLFTLTNLGAPA
AFKYFDTTIDRKQYRSTKEVLDATLIHQSITGLYETRIDL
SQLGGDEGADKRTADGSEFESPKKKRKV
03. monoABE8.1_bpNLS + Q154S
(SEQ ID NO: 266)
MSEVEFSHEYWMRHALTLAKRARDEREVPVGAVLVLNNRV
IGEGWNRAIGLHDPTAHAEIMALRQGGLVMQNYRLIDATL
YVTFEPCVMCAGAMIHSRIGRVVFGVRNAKTGAAGSLMDV
LHYPGMNHRVEITEGILADECAALLCYFFRMPRSVFNAQK
KAQSSTDSGGSSGGSSGSETPGTSESATPESSGGSSGGSD
KKYSIGLAIGTNSVGWAVITDEYKVPSKKFKVLGNTDRHS
IKKNLIGALLFDSGETAEATRLKRTARRRYTRRKNRICYL
QEIFSNEMAKVDDSFFHRLEESFLVEEDKKHERHPIFGNI
VDEVAYHEKYPTIYHLRKKLVDSTDKADLRLIYLALAHMI
KFRGHFLIEGDLNPDNSDVDKLFIQLVQTYNQLFEENPIN
ASGVDAKAILSARLSKSRRLENLIAQLPGEKKNGLFGNLI
ALSLGLTPNFKSNFDLAEDAKLQLSKDTYDDDLDNLLAQI
GDQYADLFLAAKNLSDAILLSDILRVNTEITKAPLSASMI
KRYDEHHQDLTLLKALVRQQLPEKYKEIFFDQSKNGYAGY
IDGGASQEEFYKFIKPILEKMDGTEELLVKLNREDLLRKQ
RTFDNGSIPHQIHLGELHAILRRQEDFYPFLKDNREKIEK
ILTFRIPYYVGPLARGNSRFAWMTRKSEETITPWNFEEVV
DKGASAQSFIERMTNFDKNLPNEKVLPKHSLLYEYFTVYN
ELTKVKYVTEGMRKPAFLSGEQKKAIVDLLFKTNRKVTVK
QLKEDYFKKIECFDSVEISGVEDRENASLGTYHDLLKIIK
DKDELDNEENEDILEDIVLTLTLFEDREMIEERLKTYAHL
FDDKVMKQLKRRRYTGWGRLSRKLINGIRDKQSGKTILDF
LKSDGFANRNFMQLIHDDSLTFKEDIQKAQVSGQGDSLHE
HIANLAGSPAIKKGILQTVKVVDELVKVMGRHKPENIVIE
MARENQTTQKGQKNSRERMKRIEEGIKELGSQILKEHPVE
NTQLQNEKLYLYYLQNGRDMYVDQELDINRLSDYDVDHIV
PQSFLKDDSIDNKVLTRSDKNRGKSDNVPSEEVVKKMKNY
WRQLLNAKLITQRKFDNLTKAERGGLSELDKAGFIKRQLV
ETRQITKHVAQILDSRMNTKYDENDKLIREVKVITLKSKL
VSDFRKDFQFYKVREINNYHHAHDAYLNAVVGTALIKKYP
KLESEFVYGDYKVYDVRKMIAKSEQEIGKATAKYFFYSNI
MNFFKTEITLANGEIRKRPLIETNGETGEIVWDKGRDFAT
VRKVLSMPQVNIVKKTEVQTGGFSKESILPKRNSDKLIAR
KKDWDPKKYGGFVSPTVAYSVLVVAKVEKGKSKKLKSVKE
LLGITIMERSSFEKNPIDFLEAKGYKEVKKDLIIKLPKYS
LFELENGRKRMLASARELQKGNELALPSKYVNFLYLASHY
EKLKGSPEDNEQKQLFVEQHKHYLDEIIEQISEFSKRVIL
ADANLDKVLSAYNKHRDKPIREQAENIIHLFTLTNLGAPA
AFKYFDTTIDRKQYRSTKEVLDATLIHQSITGLYETRIDL
SQLGGDEGADKRTADGSEFESPKKKRKV
04. monoABE8.1_bpNLS + Y123H
(SEQ ID NO: 267)
MSEVEFSHEYWMRHALTLAKRARDEREVPVGAVLVLNNRV
IGEGWNRAIGLHDPTAHAEIMALRQGGLVMQNYRLIDATL
YVTFEPCVMCAGAMIHSRIGRVVFGVRNAKTGAAGSLMDV
LHHPGMNHRVEITEGILADECAALLCYFFRMPRQVFNAQK
KAQSSTDSGGSSGGSSGSETPGTSESATPESSGGSSGGSD
KKYSIGLAIGTNSVGWAVITDEYKVPSKKFKVLGNTDRHS
IKKNLIGALLFDSGETAEATRLKRTARRRYTRRKNRICYL
QEIFSNEMAKVDDSFFHRLEESFLVEEDKKHERHPIFGNI
VDEVAYHEKYPTIYHLRKKLVDSTDKADLRLIYLALAHMI
KFRGHFLIEGDLNPDNSDVDKLFIQLVQTYNQLFEENPIN
ASGVDAKAILSARLSKSRRLENLIAQLPGEKKNGLFGNLI
ALSLGLTPNFKSNFDLAEDAKLQLSKDTYDDDLDNLLAQI
GDQYADLFLAAKNLSDAILLSDILRVNTEITKAPLSASMI
KRYDEHHQDLTLLKALVRQQLPEKYKEIFFDQSKNGYAGY
IDGGASQEEFYKFIKPILEKMDGTEELLVKLNREDLLRKQ
RTFDNGSIPHQIHLGELHAILRRQEDFYPFLKDNREKIEK
ILTFRIPYYVGPLARGNSRFAWMTRKSEETITPWNFEEVV
DKGASAQSFIERMTNFDKNLPNEKVLPKHSLLYEYFTVYN
ELTKVKYVTEGMRKPAFLSGEQKKAIVDLLFKTNRKVTVK
QLKEDYFKKIECFDSVEISGVEDRFNASLGTYHDLLKIIK
DKDFLDNEENEDILEDIVLTLTLFEDREMIEERLKTYAHL
FDDKVMKQLKRRRYTGWGRLSRKLINGIRDKQSGKTILDF
LKSDGFANRNFMQLIHDDSLTFKEDIQKAQVSGQGDSLHE
HIANLAGSPAIKKGILQTVKVVDELVKVMGRHKPENIVIE
MARENQTTQKGQKNSRERMKRIEEGIKELGSQILKEHPVE
NTQLQNEKLYLYYLQNGRDMYVDQELDINRLSDYDVDHIV
PQSFLKDDSIDNKVLTRSDKNRGKSDNVPSEEVVKKMKNY
WRQLLNAKLITQRKFDNLTKAERGGLSELDKAGFIKRQLV
ETRQITKHVAQILDSRMNTKYDENDKLIREVKVITLKSKL
VSDFRKDFQEYKVREINNYHHAHDAYLNAVVGTALIKKYP
KLESEFVYGDYKVYDVRKMIAKSEQEIGKATAKYFFYSNI
MNFFKTEITLANGEIRKRPLIETNGETGEIVWDKGRDFAT
VRKVLSMPQVNIVKKTEVQTGGFSKESILPKRNSDKLIAR
KKDWDPKKYGGFVSPTVAYSVLVVAKVEKGKSKKLKSVKE
LLGITIMERSSFEKNPIDFLEAKGYKEVKKDLIIKLPKYS
LFELENGRKRMLASARELQKGNELALPSKYVNFLYLASHY
EKLKGSPEDNEQKQLFVEQHKHYLDEIIEQISEFSKRVIL
ADANLDKVLSAYNKHRDKPIREQAENIIHLFTLTNLGAPA
AFKYFDTTIDRKQYRSTKEVLDATLIHQSITGLYETRIDL
SQLGGDEGADKRTADGSEFESPKKKRKV
05. monoABE8.1_bpNLS + V82S
(SEQ ID NO: 268)
MSEVEFSHEYWMRHALTLAKRARDEREVPVGAVLVLNNRV
IGEGWNRAIGLHDPTAHAEIMALRQGGLVMQNYRLIDATL
YSTFEPCVMCAGAMIHSRIGRVVFGVRNAKTGAAGSLMDV
LHYPGMNHRVEITEGILADECAALLCYFFRMPRQVFNAQK
KAQSSTDSGGSSGGSSGSETPGTSESATPESSGGSSGGSD
KKYSIGLAIGTNSVGWAVITDEYKVPSKKFKVLGNTDRHS
IKKNLIGALLFDSGETAEATRLKRTARRRYTRRKNRICYL
QEIFSNEMAKVDDSFFHRLEESFLVEEDKKHERHPIFGNI
VDEVAYHEKYPTIYHLRKKLVDSTDKADLRLIYLALAHMI
KFRGHFLIEGDLNPDNSDVDKLFIQLVQTYNQLFEENPIN
ASGVDAKAILSARLSKSRRLENLIAQLPGEKKNGLFGNLI
ALSLGLTPNFKSNFDLAEDAKLQLSKDTYDDDLDNLLAQI
GDQYADLFLAAKNLSDAILLSDILRVNTEITKAPLSASMI
KRYDEHHQDLTLLKALVRQQLPEKYKEIFFDQSKNGYAGY
IDGGASQEEFYKFIKPILEKMDGTEELLVKLNREDLLRKQ
RTFDNGSIPHQIHLGELHAILRRQEDFYPFLKDNREKIEK
ILTFRIPYYVGPLARGNSRFAWMTRKSEETITPWNFEEVV
DKGASAQSFIERMTNFDKNLPNEKVLPKHSLLYEYFTVYN
ELTKVKYVTEGMRKPAFLSGEQKKAIVDLLFKTNRKVTVK
QLKEDYFKKIECFDSVEISGVEDRFNASLGTYHDLLKIIK
DKDFLDNEENEDILEDIVLTLTLFEDREMIEERLKTYAHL
FDDKVMKQLKRRRYTGWGRLSRKLINGIRDKQSGKTILDF
LKSDGFANRNFMQLIHDDSLTFKEDIQKAQVSGQGDSLHE
HIANLAGSPAIKKGILQTVKVVDELVKVMGRHKPENIVIE
MARENQTTQKGQKNSRERMKRIEEGIKELGSQILKEHPVE
NTQLQNEKLYLYYLQNGRDMYVDQELDINRLSDYDVDHIV
PQSFLKDDSIDNKVLTRSDKNRGKSDNVPSEEVVKKMKNY
WRQLLNAKLITQRKFDNLTKAERGGLSELDKAGFIKRQLV
ETRQITKHVAQILDSRMNTKYDENDKLIREVKVITLKSKL
VSDFRKDFQFYKVREINNYHHAHDAYLNAVVGTALIKKYP
KLESEFVYGDYKVYDVRKMIAKSEQEIGKATAKYFFYSNI
MNFFKTEITLANGEIRKRPLIETNGETGEIVWDKGRDFAT
VRKVLSMPQVNIVKKTEVQTGGFSKESILPKRNSDKLIAR
KKDWDPKKYGGFVSPTVAYSVLVVAKVEKGKSKKLKSVKE
LLGITIMERSSFEKNPIDFLEAKGYKEVKKDLIIKLPKYS
LFELENGRKRMLASARELQKGNELALPSKYVNFLYLASHY
EKLKGSPEDNEQKQLFVEQHKHYLDEIIEQISEFSKRVIL
ADANLDKVLSAYNKHRDKPIREQAENIIHLFTLTNLGAPA
AFKYFDTTIDRKQYRSTKEVLDATLIHQSITGLYETRIDL
SQLGGDEGADKRTADGSEFESPKKKRKV
06. monoABE8.1_bpNLS + T166R
(SEQ ID NO: 269)
MSEVEFSHEYWMRHALTLAKRARDEREVPVGAVLVLNNRV
IGEGWNRAIGLHDPTAHAEIMALRQGGLVMQNYRLIDATL
YVTFEPCVMCAGAMIHSRIGRVVFGVRNAKTGAAGSLMDV
LHYPGMNHRVEITEGILADECAALLCYFFRMPRQVFNAQK
KAQSSRDSGGSSGGSSGSETPGTSESATPESSGGSSGGSD
KKYSIGLAIGTNSVGWAVITDEYKVPSKKFKVLGNTDRHS
IKKNLIGALLFDSGETAEATRLKRTARRRYTRRKNRICYL
QEIFSNEMAKVDDSFFHRLEESFLVEEDKKHERHPIFGNI
VDEVAYHEKYPTIYHLRKKLVDSTDKADLRLIYLALAHMI
KFRGHFLIEGDLNPDNSDVDKLFIQLVQTYNQLFEENPIN
ASGVDAKAILSARLSKSRRLENLIAQLPGEKKNGLFGNLI
ALSLGLTPNFKSNFDLAEDAKLQLSKDTYDDDLDNLLAQI
GDQYADLFLAAKNLSDAILLSDILRVNTEITKAPLSASMI
KRYDEHHQDLTLLKALVRQQLPEKYKEIFFDQSKNGYAGY
IDGGASQEEFYKFIKPILEKMDGTEELLVKLNREDLLRKQ
RTFDNGSIPHQIHLGELHAILRRQEDFYPFLKDNREKIEK
ILTFRIPYYVGPLARGNSRFAWMTRKSEETITPWNFEEVV
DKGASAQSFIERMTNFDKNLPNEKVLPKHSLLYEYFTVYN
ELTKVKYVTEGMRKPAFLSGEQKKAIVDLLFKTNRKVTVK
QLKEDYFKKIECFDSVEISGVEDRFNASLGTYHDLLKIIK
DKDFLDNEENEDILEDIVLTLTLFEDREMIEERLKTYAHL
FDDKVMKQLKRRRYTGWGRLSRKLINGIRDKQSGKTILDF
LKSDGFANRNFMQLIHDDSLTFKEDIQKAQVSGQGDSLHE
HIANLAGSPAIKKGILQTVKVVDELVKVMGRHKPENIVIE
MARENQTTQKGQKNSRERMKRIEEGIKELGSQILKEHPVE
NTQLQNEKLYLYYLQNGRDMYVDQELDINRLSDYDVDHIV
PQSFLKDDSIDNKVLTRSDKNRGKSDNVPSEEVVKKMKNY
WRQLLNAKLITQRKFDNLTKAERGGLSELDKAGFIKRQLV
ETRQITKHVAQILDSRMNTKYDENDKLIREVKVITLKSKL
VSDFRKDFQFYKVREINNYHHAHDAYLNAVVGTALIKKYP
KLESEFVYGDYKVYDVRKMIAKSEQEIGKATAKYFFYSNI
MNFFKTEITLANGEIRKRPLIETNGETGEIVWDKGRDFAT
VRKVLSMPQVNIVKKTEVQTGGFSKESILPKRNSDKLIAR
KKDWDPKKYGGFVSPTVAYSVLVVAKVEKGKSKKLKSVKE
LLGITIMERSSFEKNPIDFLEAKGYKEVKKDLIIKLPKYS
LFELENGRKRMLASARELQKGNELALPSKYVNFLYLASHY
EKLKGSPEDNEQKQLFVEQHKHYLDEIIEQISEFSKRVIL
ADANLDKVLSAYNKHRDKPIREQAENIIHLFTLTNLGAPA
AFKYFDTTIDRKQYRSTKEVLDATLIHQSITGLYETRIDL
SQLGGDEGADKRTADGSEFESPKKKRKV
07. monoABE8.1_bpNLS + Q154R
(SEQ ID NO: 270)
MSEVEFSHEYWMRHALTLAKRARDEREVPVGAVLVLNNRV
IGEGWNRAIGLHDPTAHAEIMALRQGGLVMQNYRLIDATL
YVTFEPCVMCAGAMIHSRIGRVVFGVRNAKTGAAGSLMDV
LHYPGMNHRVEITEGILADECAALLCYEFRMPRRVFNAQK
KAQSSTDSGGSSGGSSGSETPGTSESATPESSGGSSGGSD
KKYSIGLAIGTNSVGWAVITDEYKVPSKKFKVLGNTDRHS
IKKNLIGALLFDSGETAEATRLKRTARRRYTRRKNRICYL
QEIFSNEMAKVDDSFFHRLEESFLVEEDKKHERHPIFGNI
VDEVAYHEKYPTIYHLRKKLVDSTDKADLRLIYLALAHMI
KFRGHFLIEGDLNPDNSDVDKLFIQLVQTYNQLFEENPIN
ASGVDAKAILSARLSKSRRLENLIAQLPGEKKNGLFGNLI
ALSLGLTPNFKSNFDLAEDAKLQLSKDTYDDDLDNLLAQI
GDQYADLFLAAKNLSDAILLSDILRVNTEITKAPLSASMI
KRYDEHHQDLTLLKALVRQQLPEKYKEIFFDQSKNGYAGY
IDGGASQEEFYKFIKPILEKMDGTEELLVKLNREDLLRKQ
RTFDNGSIPHQIHLGELHAILRRQEDFYPFLKDNREKIEK
ILTFRIPYYVGPLARGNSRFAWMTRKSEETITPWNFEEVV
DKGASAQSFIERMTNFDKNLPNEKVLPKHSLLYEYFTVYN
ELTKVKYVTEGMRKPAFLSGEQKKAIVDLLFKTNRKVTVK
QLKEDYFKKIECFDSVEISGVEDRFNASLGTYHDLLKIIK
DKDFLDNEENEDILEDIVLTLTLFEDREMIEERLKTYAHL
FDDKVMKQLKRRRYTGWGRLSRKLINGIRDKQSGKTILDF
LKSDGFANRNFMQLIHDDSLTFKEDIQKAQVSGQGDSLHE
HIANLAGSPAIKKGILQTVKVVDELVKVMGRHKPENIVIE
MARENQTTQKGQKNSRERMKRIEEGIKELGSQILKEHPVE
NTQLQNEKLYLYYLQNGRDMYVDQELDINRLSDYDVDHIV
PQSFLKDDSIDNKVLTRSDKNRGKSDNVPSEEVVKKMKNY
WRQLLNAKLITQRKFDNLTKAERGGLSELDKAGFIKRQLV
ETRQITKHVAQILDSRMNTKYDENDKLIREVKVITLKSKL
VSDFRKDFQFYKVREINNYHHAHDAYLNAVVGTALIKKYP
KLESEFVYGDYKVYDVRKMIAKSEQEIGKATAKYFFYSNI
MNFFKTEITLANGEIRKRPLIETNGETGEIVWDKGRDFAT
VRKVLSMPQVNIVKKTEVQTGGFSKESILPKRNSDKLIAR
KKDWDPKKYGGFVSPTVAYSVLVVAKVEKGKSKKLKSVKE
LLGITIMERSSFEKNPIDFLEAKGYKEVKKDLIIKLPKYS
LFELENGRKRMLASARELQKGNELALPSKYVNFLYLASHY
EKLKGSPEDNEQKQLFVEQHKHYLDEIIEQISEFSKRVIL
ADANLDKVLSAYNKHRDKPIREQAENIIHLFTLTNLGAPA
AFKYFDTTIDRKQYRSTKEVLDATLIHQSITGLYETRIDL
SQLGGDEGADKRTADGSEFESPKKKRKV
08. monoABE8.1_bpNLS + Y147R_Q154R_Y123H
(SEQ ID NO: 271)
MSEVEFSHEYWMRHALTLAKRARDEREVPVGAVLVLNNRV
IGEGWNRAIGLHDPTAHAEIMALRQGGLVMQNYRLIDATL
YVTFEPCVMCAGAMIHSRIGRVVFGVRNAKTGAAGSLMDV
LHHPGMNHRVEITEGILADECAALLCRFFRMPRRVFNAQK
KAQSSTDSGGSSGGSSGSETPGTSESATPESSGGSSGGSD
KKYSIGLAIGTNSVGWAVITDEYKVPSKKFKVLGNTDRHS
IKKNLIGALLFDSGETAEATRLKRTARRRYTRRKNRICYL
QEIFSNEMAKVDDSFFHRLEESFLVEEDKKHERHPIFGNI
VDEVAYHEKYPTIYHLRKKLVDSTDKADLRLIYLALAHMI
KFRGHFLIEGDLNPDNSDVDKLFIQLVQTYNQLFEENPIN
ASGVDAKAILSARLSKSRRLENLIAQLPGEKKNGLFGNLI
ALSLGLTPNFKSNFDLAEDAKLQLSKDTYDDDLDNLLAQI
GDQYADLFLAAKNLSDAILLSDILRVNTEITKAPLSASMI
KRYDEHHQDLTLLKALVRQQLPEKYKEIFFDQSKNGYAGY
IDGGASQEEFYKFIKPILEKMDGTEELLVKLNREDLLRKQ
RTFDNGSIPHQIHLGELHAILRRQEDFYPFLKDNREKIEK
ILTFRIPYYVGPLARGNSRFAWMTRKSEETITPWNFEEVV
DKGASAQSFIERMTNFDKNLPNEKVLPKHSLLYEYFTVYN
ELTKVKYVTEGMRKPAFLSGEQKKAIVDLLFKTNRKVTVK
QLKEDYFKKIECFDSVEISGVEDRFNASLGTYHDLLKIIK
DKDFLDNEENEDILEDIVLTLTLFEDREMIEERLKTYAHL
FDDKVMKQLKRRRYTGWGRLSRKLINGIRDKQSGKTILDF
LKSDGFANRNFMQLIHDDSLTFKEDIQKAQVSGQGDSLHE
HIANLAGSPAIKKGILQTVKVVDELVKVMGRHKPENIVIE
MARENQTTQKGQKNSRERMKRIEEGIKELGSQILKEHPVE
NTQLQNEKLYLYYLQNGRDMYVDQELDINRLSDYDVDHIV
PQSFLKDDSIDNKVLTRSDKNRGKSDNVPSEEVVKKMKNY
WRQLLNAKLITQRKFDNLTKAERGGLSELDKAGFIKRQLV
ETRQITKHVAQILDSRMNTKYDENDKLIREVKVITLKSKL
VSDFRKDFQFYKVREINNYHHAHDAYLNAVVGTALIKKYP
KLESEFVYGDYKVYDVRKMIAKSEQEIGKATAKYFFYSNI
MNFFKTEITLANGEIRKRPLIETNGETGEIVWDKGRDFAT
VRKVLSMPQVNIVKKTEVQTGGFSKESILPKRNSDKLIAR
KKDWDPKKYGGFVSPTVAYSVLVVAKVEKGKSKKLKSVKE
LLGITIMERSSFEKNPIDFLEAKGYKEVKKDLIIKLPKYS
LFELENGRKRMLASARELQKGNELALPSKYVNFLYLASHY
EKLKGSPEDNEQKQLFVEQHKHYLDEIIEQISEFSKRVIL
ADANLDKVLSAYNKHRDKPIREQAENIIHLFTLTNLGAPA
AFKYFDTTIDRKQYRSTKEVLDATLIHQSITGLYETRIDL
SQLGGDEGADKRTADGSEFESPKKKRKV
09. monoABE8.1_bpNLS + Y147R_Q154R_I76Y
(SEQ ID NO: 272)
MSEVEFSHEYWMRHALTLAKRARDEREVPVGAVLVLNNRV
IGEGWNRAIGLHDPTAHAEIMALRQGGLVMQNYRLYDATL
YVTFEPCVMCAGAMIHSRIGRVVFGVRNAKTGAAGSLMDV
LHYPGMNHRVEITEGILADECAALLCRFFRMPRRVFNAQK
KAQSSTDSGGSSGGSSGSETPGTSESATPESSGGSSGGSD
KKYSIGLAIGTNSVGWAVITDEYKVPSKKFKVLGNTDRHS
IKKNLIGALLFDSGETAEATRLKRTARRRYTRRKNRICYL
QEIFSNEMAKVDDSFFHRLEESFLVEEDKKHERHPIFGNI
VDEVAYHEKYPTIYHLRKKLVDSTDKADLRLIYLALAHMI
KFRGHFLIEGDLNPDNSDVDKLFIQLVQTYNQLFEENPIN
ASGVDAKAILSARLSKSRRLENLIAQLPGEKKNGLFGNLI
ALSLGLTPNFKSNFDLAEDAKLQLSKDTYDDDLDNLLAQI
GDQYADLFLAAKNLSDAILLSDILRVNTEITKAPLSASMI
KRYDEHHQDLTLLKALVRQQLPEKYKEIFFDQSKNGYAGY
IDGGASQEEFYKFIKPILEKMDGTEELLVKLNREDLLRKQ
RTFDNGSIPHQIHLGELHAILRRQEDFYPFLKDNREKIEK
ILTFRIPYYVGPLARGNSRFAWMTRKSEETITPWNFEEVV
DKGASAQSFIERMTNFDKNLPNEKVLPKHSLLYEYFTVYN
ELTKVKYVTEGMRKPAFLSGEQKKAIVDLLFKTNRKVTVK
QLKEDYFKKIECFDSVEISGVEDRFNASLGTYHDLLKIIK
DKDFLDNEENEDILEDIVLTLTLFEDREMIEERLKTYAHL
FDDKVMKQLKRRRYTGWGRLSRKLINGIRDKQSGKTILDE
LKSDGFANRNEMQLIHDDSLTFKEDIQKAQVSGQGDSLHE
HIANLAGSPAIKKGILQTVKVVDELVKVMGRHKPENIVIE
MARENQTTQKGQKNSRERMKRIEEGIKELGSQILKEHPVE
NTQLQNEKLYLYYLQNGRDMYVDQELDINRLSDYDVDHIV
PQSFLKDDSIDNKVLTRSDKNRGKSDNVPSEEVVKKMKNY
WRQLLNAKLITQRKFDNLTKAERGGLSELDKAGFIKRQLV
ETRQITKHVAQILDSRMNTKYDENDKLIREVKVITLKSKL
VSDFRKDFQFYKVREINNYHHAHDAYLNAVVGTALIKKYP
KLESEFVYGDYKVYDVRKMIAKSEQEIGKATAKYFFYSNI
MNFFKTEITLANGEIRKRPLIETNGETGEIVWDKGRDFAT
VRKVLSMPQVNIVKKTEVQTGGFSKESILPKRNSDKLIAR
KKDWDPKKYGGFVSPTVAYSVLVVAKVEKGKSKKLKSVKE
LLGITIMERSSFEKNPIDFLEAKGYKEVKKDLIIKLPKYS
LFELENGRKRMLASARELQKGNELALPSKYVNFLYLASHY
EKLKGSPEDNEQKQLFVEQHKHYLDEIIEQISEFSKRVIL
ADANLDKVLSAYNKHRDKPIREQAENIIHLFTLTNLGAPA
AFKYFDTTIDRKQYRSTKEVLDATLIHQSITGLYETRIDL
SQLGGDEGADKRTADGSEFESPKKKRKV
10. monoABE8.1_bpNLS + Y147R_Q154R_T166R
(SEQ ID NO: 273)
MSEVEFSHEYWMRHALTLAKRARDEREVPVGAVLVLNNRV
IGEGWNRAIGLHDPTAHAEIMALRQGGLVMQNYRLIDATL
YVTFEPCVMCAGAMIHSRIGRVVFGVRNAKTGAAGSLMDV
LHYPGMNHRVEITEGILADECAALLCRFFRMPRRVFNAQK
KAQSSRDSGGSSGGSSGSETPGTSESATPESSGGSSGGSD
KKYSIGLAIGTNSVGWAVITDEYKVPSKKFKVLGNTDRHS
IKKNLIGALLFDSGETAEATRLKRTARRRYTRRKNRICYL
QEIFSNEMAKVDDSFFHRLEESFLVEEDKKHERHPIFGNI
VDEVAYHEKYPTIYHLRKKLVDSTDKADLRLIYLALAHMI
KFRGHFLIEGDLNPDNSDVDKLFIQLVQTYNQLFEENPIN
ASGVDAKAILSARLSKSRRLENLIAQLPGEKKNGLFGNLI
ALSLGLTPNFKSNFDLAEDAKLQLSKDTYDDDLDNLLAQI
GDQYADLFLAAKNLSDAILLSDILRVNTEITKAPLSASMI
KRYDEHHQDLTLLKALVRQQLPEKYKEIFFDQSKNGYAGY
IDGGASQEEFYKFIKPILEKMDGTEELLVKLNREDLLRKQ
RTFDNGSIPHQIHLGELHAILRRQEDFYPFLKDNREKIEK
ILTFRIPYYVGPLARGNSRFAWMTRKSEETITPWNFEEVV
DKGASAQSFIERMTNFDKNLPNEKVLPKHSLLYEYFTVYN
ELTKVKYVTEGMRKPAFLSGEQKKAIVDLLFKTNRKVTVK
QLKEDYFKKIECFDSVEISGVEDRFNASLGTYHDLLKIIK
DKDFLDNEENEDILEDIVLTLTLFEDREMIEERLKTYAHL
FDDKVMKQLKRRRYTGWGRLSRKLINGIRDKQSGKTILDF
LKSDGFANRNFMQLIHDDSLTFKEDIQKAQVSGQGDSLHE
HIANLAGSPAIKKGILQTVKVVDELVKVMGRHKPENIVIE
MARENQTTQKGQKNSRERMKRIEEGIKELGSQILKEHPVE
NTQLQNEKLYLYYLQNGRDMYVDQELDINRLSDYDVDHIV
PQSFLKDDSIDNKVLTRSDKNRGKSDNVPSEEVVKKMKNY
WRQLLNAKLITQRKFDNLTKAERGGLSELDKAGFIKRQLV
ETRQITKHVAQILDSRMNTKYDENDKLIREVKVITLKSKL
VSDFRKDFQFYKVREINNYHHAHDAYLNAVVGTALIKKYP
KLESEFVYGDYKVYDVRKMIAKSEQEIGKATAKYFFYSNI
MNFFKTEITLANGEIRKRPLIETNGETGEIVWDKGRDFAT
VRKVLSMPQVNIVKKTEVQTGGFSKESILPKRNSDKLIAR
KKDWDPKKYGGFVSPTVAYSVLVVAKVEKGKSKKLKSVKE
LLGITIMERSSFEKNPIDFLEAKGYKEVKKDLIIKLPKYS
LFELENGRKRMLASARELQKGNELALPSKYVNFLYLASHY
EKLKGSPEDNEQKQLFVEQHKHYLDEIIEQISEFSKRVIL
ADANLDKVLSAYNKHRDKPIREQAENIIHLFTLTNLGAPA
AFKYFDTTIDRKQYRSTKEVLDATLIHQSITGLYETRIDL
SQLGGDEGADKRTADGSEFESPKKKRKV
11. monoABE8.1_bpNLS + Y147T_Q154R
(SEQ ID NO: 274)
MSEVEFSHEYWMRHALTLAKRARDEREVPVGAVLVLNNRV
IGEGWNRAIGLHDPTAHAEIMALRQGGLVMQNYRLIDATL
YVTFEPCVMCAGAMIHSRIGRVVFGVRNAKTGAAGSLMDV
LHYPGMNHRVEITEGILADECAALLCTFFRMPRRVFNAQK
KAQSSTDSGGSSGGSSGSETPGTSESATPESSGGSSGGSD
KKYSIGLAIGTNSVGWAVITDEYKVPSKKFKVLGNTDRHS
IKKNLIGALLFDSGETAEATRLKRTARRRYTRRKNRICYL
QEIFSNEMAKVDDSFFHRLEESFLVEEDKKHERHPIFGNI
VDEVAYHEKYPTIYHLRKKLVDSTDKADLRLIYLALAHMI
KFRGHFLIEGDLNPDNSDVDKLFIQLVQTYNQLFEENPIN
ASGVDAKAILSARLSKSRRLENLIAQLPGEKKNGLFGNLI
ALSLGLTPNFKSNFDLAEDAKLQLSKDTYDDDLDNLLAQI
GDQYADLFLAAKNLSDAILLSDILRVNTEITKAPLSASMI
KRYDEHHQDLTLLKALVRQQLPEKYKEIFFDQSKNGYAGY
IDGGASQEEFYKFIKPILEKMDGTEELLVKLNREDLLRKQ
RTFDNGSIPHQIHLGELHAILRRQEDFYPFLKDNREKIEK
ILTFRIPYYVGPLARGNSRFAWMTRKSEETITPWNFEEVV
DKGASAQSFIERMTNFDKNLPNEKVLPKHSLLYEYFTVYN
ELTKVKYVTEGMRKPAFLSGEQKKAIVDLLFKTNRKVTVK
QLKEDYFKKIECFDSVEISGVEDRFNASLGTYHDLLKIIK
DKDFLDNEENEDILEDIVLTLTLFEDREMIEERLKTYAHL
FDDKVMKQLKRRRYTGWGRLSRKLINGIRDKQSGKTILDF
LKSDGFANRNFMQLIHDDSLTFKEDIQKAQVSGQGDSLHE
HIANLAGSPAIKKGILQTVKVVDELVKVMGRHKPENIVIE
MARENQTTQKGQKNSRERMKRIEEGIKELGSQILKEHPVE
NTQLQNEKLYLYYLQNGRDMYVDQELDINRLSDYDVDHIV
PQSFLKDDSIDNKVLTRSDKNRGKSDNVPSEEVVKKMKNY
WRQLLNAKLITQRKFDNLTKAERGGLSELDKAGFIKRQLV
ETRQITKHVAQILDSRMNTKYDENDKLIREVKVITLKSKL
VSDFRKDFQFYKVREINNYHHAHDAYLNAVVGTALIKKYP
KLESEFVYGDYKVYDVRKMIAKSEQEIGKATAKYFFYSNI
MNFFKTEITLANGEIRKRPLIETNGETGEIVWDKGRDFAT
VRKVLSMPQVNIVKKTEVQTGGFSKESILPKRNSDKLIAR
KKDWDPKKYGGFVSPTVAYSVLVVAKVEKGKSKKLKSVKE
LLGITIMERSSFEKNPIDFLEAKGYKEVKKDLIIKLPKYS
LFELENGRKRMLASARELQKGNELALPSKYVNFLYLASHY
EKLKGSPEDNEQKQLFVEQHKHYLDEIIEQISEFSKRVIL
ADANLDKVLSAYNKHRDKPIREQAENIIHLFTLTNLGAPA
AFKYFDTTIDRKQYRSTKEVLDATLIHQSITGLYETRIDL
SQLGGDEGADKRTADGSEFESPKKKRKV
12. monoABE8.1_bpNLS + Y147T_Q154S
(SEQ ID NO: 275)
MSEVEFSHEYWMRHALTLAKRARDEREVPVGAVLVLNNRV
IGEGWNRAIGLHDPTAHAEIMALRQGGLVMQNYRLIDATL
YVTFEPCVMCAGAMIHSRIGRVVFGVRNAKTGAAGSLMDV
LHYPGMNHRVEITEGILADECAALLCTFFRMPRSVFNAQK
KAQSSTDSGGSSGGSSGSETPGTSESATPESSGGSSGGSD
KKYSIGLAIGTNSVGWAVITDEYKVPSKKFKVLGNTDRHS
IKKNLIGALLFDSGETAEATRLKRTARRRYTRRKNRICYL
QEIFSNEMAKVDDSFFHRLEESFLVEEDKKHERHPIFGNI
VDEVAYHEKYPTIYHLRKKLVDSTDKADLRLIYLALAHMI
KFRGHFLIEGDLNPDNSDVDKLFIQLVQTYNQLFEENPIN
ASGVDAKAILSARLSKSRRLENLIAQLPGEKKNGLFGNLI
ALSLGLTPNFKSNFDLAEDAKLQLSKDTYDDDLDNLLAQI
GDQYADLFLAAKNLSDAILLSDILRVNTEITKAPLSASMI
KRYDEHHQDLTLLKALVRQQLPEKYKEIFFDQSKNGYAGY
IDGGASQEEFYKFIKPILEKMDGTEELLVKLNREDLLRKQ
RTFDNGSIPHQIHLGELHAILRRQEDFYPFLKDNREKIEK
ILTFRIPYYVGPLARGNSRFAWMTRKSEETITPWNFEEVV
DKGASAQSFIERMTNFDKNLPNEKVLPKHSLLYEYFTVYN
ELTKVKYVTEGMRKPAFLSGEQKKAIVDLLFKTNRKVTVK
QLKEDYFKKIECFDSVEISGVEDRFNASLGTYHDLLKIIK
DKDFLDNEENEDILEDIVLTLTLFEDREMIEERLKTYAHL
FDDKVMKQLKRRRYTGWGRLSRKLINGIRDKQSGKTILDF
LKSDGFANRNFMQLIHDDSLTFKEDIQKAQVSGQGDSLHE
HIANLAGSPAIKKGILQTVKVVDELVKVMGRHKPENIVIE
MARENQTTQKGQKNSRERMKRIEEGIKELGSQILKEHPVE
NTQLQNEKLYLYYLQNGRDMYVDQELDINRLSDYDVDHIV
PQSFLKDDSIDNKVLTRSDKNRGKSDNVPSEEVVKKMKNY
WRQLLNAKLITQRKFDNLTKAERGGLSELDKAGFIKRQLV
ETRQITKHVAQILDSRMNTKYDENDKLIREVKVITLKSKL
VSDFRKDFQFYKVREINNYHHAHDAYLNAVVGTALIKKYP
KLESEFVYGDYKVYDVRKMIAKSEQEIGKATAKYFFYSNI
MNFFKTEITLANGEIRKRPLIETNGETGEIVWDKGRDFAT
VRKVLSMPQVNIVKKTEVQTGGFSKESILPKRNSDKLIAR
KKDWDPKKYGGFVSPTVAYSVLVVAKVEKGKSKKLKSVKE
LLGITIMERSSFEKNPIDFLEAKGYKEVKKDLIIKLPKYS
LFELENGRKRMLASARELQKGNELALPSKYVNFLYLASHY
EKLKGSPEDNEQKQLFVEQHKHYLDEIIEQISEFSKRVIL
ADANLDKVLSAYNKHRDKPIREQAENIIHLFTLTNLGAPA
AFKYFDTTIDRKQYRSTKEVLDATLIHQSITGLYETRIDL
SQLGGDEGADKRTADGSEFESPKKKRKV
13. monoABE8.1_bpNLS + H123_Y123_HY147R_
Q154R_I76Y
(SEQ ID NO: 276)
MSEVEFSHEYWMRHALTLAKRARDEREVPVGAVLVLNNRV
IGEGWNRAIGLHDPTAHAEIMALRQGGLVMQNYRLYDATL
YVTFEPCVMCAGAMIHSRIGRVVFGVRNAKTGAAGSLMDV
LHHPGMNHRVEITEGILADECAALLCRFFRMPRRVFNAQK
KAQSSTDSGGSSGGSSGSETPGTSESATPESSGGSSGGSD
KKYSIGLAIGTNSVGWAVITDEYKVPSKKFKVLGNTDRHS
IKKNLIGALLFDSGETAEATRLKRTARRRYTRRKNRICYL
QEIFSNEMAKVDDSEFHRLEESFLVEEDKKHERHPIFGNI
VDEVAYHEKYPTIYHLRKKLVDSTDKADLRLIYLALAHMI
KFRGHFLIEGDLNPDNSDVDKLFIQLVQTYNQLFEENPIN
ASGVDAKAILSARLSKSRRLENLIAQLPGEKKNGLFGNLI
ALSLGLTPNFKSNFDLAEDAKLQLSKDTYDDDLDNLLAQI
GDQYADLFLAAKNLSDAILLSDILRVNTEITKAPLSASMI
KRYDEHHQDLTLLKALVRQQLPEKYKEIFFDQSKNGYAGY
IDGGASQEEFYKFIKPILEKMDGTEELLVKLNREDLLRKQ
RTFDNGSIPHQIHLGELHAILRRQEDFYPFLKDNREKIEK
ILTFRIPYYVGPLARGNSRFAWMTRKSEETITPWNFEEVV
DKGASAQSFIERMTNFDKNLPNEKVLPKHSLLYEYFTVYN
ELTKVKYVTEGMRKPAFLSGEQKKAIVDLLFKTNRKVTVK
QLKEDYFKKIECFDSVEISGVEDRFNASLGTYHDLLKIIK
DKDFLDNEENEDILEDIVLTLTLFEDREMIEERLKTYAHL
FDDKVMKQLKRRRYTGWGRLSRKLINGIRDKQSGKTILDF
LKSDGFANRNFMQLIHDDSLTFKEDIQKAQVSGQGDSLHE
HIANLAGSPAIKKGILQTVKVVDELVKVMGRHKPENIVIE
MARENQTTQKGQKNSRERMKRIEEGIKELGSQILKEHPVE
NTQLQNEKLYLYYLQNGRDMYVDQELDINRLSDYDVDHIV
PQSFLKDDSIDNKVLTRSDKNRGKSDNVPSEEVVKKMKNY
WRQLLNAKLITQRKFDNLTKAERGGLSELDKAGFIKRQLV
ETRQITKHVAQILDSRMNTKYDENDKLIREVKVITLKSKL
VSDFRKDFQFYKVREINNYHHAHDAYLNAVVGTALIKKYP
KLESEFVYGDYKVYDVRKMIAKSEQEIGKATAKYFFYSNI
MNFFKTEITLANGEIRKRPLIETNGETGEIVWDKGRDFAT
VRKVLSMPQVNIVKKTEVQTGGFSKESILPKRNSDKLIAR
KKDWDPKKYGGFVSPTVAYSVLVVAKVEKGKSKKLKSVKE
LLGITIMERSSFEKNPIDFLEAKGYKEVKKDLIIKLPKYS
LFELENGRKRMLASARELQKGNELALPSKYVNFLYLASHY
EKLKGSPEDNEQKQLFVEQHKHYLDEIIEQISEFSKRVIL
ADANLDKVLSAYNKHRDKPIREQAENIIHLFTLTNLGAPA
AFKYFDTTIDRKQYRSTKEVLDATLIHQSITGLYETRIDL
SQLGGDEGADKRTADGSEFESPKKKRKV
14. monoABE8.1_bpNLS + V82S + Q154R
(SEQ ID NO: 277)
MSEVEFSHEYWMRHALTLAKRARDEREVPVGAVLVLNNRV
IGEGWNRAIGLHDPTAHAEIMALRQGGLVMQNYRLIDATL
YSTFEPCVMCAGAMIHSRIGRVVFGVRNAKTGAAGSLMDV
LHYPGMNHRVEITEGILADECAALLCYFFRMPRRVFNAQK
KAQSSTDSGGSSGGSSGSETPGTSESATPESSGGSSGGSD
KKYSIGLAIGTNSVGWAVITDEYKVPSKKFKVLGNTDRHS
IKKNLIGALLFDSGETAEATRLKRTARRRYTRRKNRICYL
QEIFSNEMAKVDDSFFHRLEESFLVEEDKKHERHPIFGNI
VDEVAYHEKYPTIYHLRKKLVDSTDKADLRLIYLALAHMI
KFRGHFLIEGDLNPDNSDVDKLFIQLVQTYNQLFEENPIN
ASGVDAKAILSARLSKSRRLENLIAQLPGEKKNGLFGNLI
ALSLGLTPNFKSNFDLAEDAKLQLSKDTYDDDLDNLLAQI
GDQYADLFLAAKNLSDAILLSDILRVNTEITKAPLSASMI
KRYDEHHQDLTLLKALVRQQLPEKYKEIFFDQSKNGYAGY
IDGGASQEEFYKFIKPILEKMDGTEELLVKLNREDLLRKQ
RTFDNGSIPHQIHLGELHAILRRQEDFYPFLKDNREKIEK
ILTFRIPYYVGPLARGNSRFAWMTRKSEETITPWNFEEVV
DKGASAQSFIERMTNFDKNLPNEKVLPKHSLLYEYFTVYN
ELTKVKYVTEGMRKPAFLSGEQKKAIVDLLFKTNRKVTVK
QLKEDYFKKIECFDSVEISGVEDRFNASLGTYHDLLKIIK
DKDFLDNEENEDILEDIVLTLTLFEDREMIEERLKTYAHL
FDDKVMKQLKRRRYTGWGRLSRKLINGIRDKQSGKTILDF
LKSDGFANRNFMQLIHDDSLTFKEDIQKAQVSGQGDSLHE
HIANLAGSPAIKKGILQTVKVVDELVKVMGRHKPENIVIE
MARENQTTQKGQKNSRERMKRIEEGIKELGSQILKEHPVE
NTQLQNEKLYLYYLQNGRDMYVDQELDINRLSDYDVDHIV
PQSFLKDDSIDNKVLTRSDKNRGKSDNVPSEEVVKKMKNY
WRQLLNAKLITQRKFDNLTKAERGGLSELDKAGFIKRQLV
ETRQITKHVAQILDSRMNTKYDENDKLIREVKVITLKSKL
VSDFRKDFQFYKVREINNYHHAHDAYLNAVVGTALIKKYP
KLESEFVYGDYKVYDVRKMIAKSEQEIGKATAKYFFYSNI
MNFFKTEITLANGEIRKRPLIETNGETGEIVWDKGRDFAT
VRKVLSMPQVNIVKKTEVQTGGFSKESILPKRNSDKLIAR
KKDWDPKKYGGFVSPTVAYSVLVVAKVEKGKSKKLKSVKE
LLGITIMERSSFEKNPIDFLEAKGYKEVKKDLIIKLPKYS
LFELENGRKRMLASARELQKGNELALPSKYVNFLYLASHY
EKLKGSPEDNEQKQLFVEQHKHYLDEIIEQISEFSKRVIL
ADANLDKVLSAYNKHRDKPIREQAENIIHLFTLTNLGAPA
AFKYFDTTIDRKQYRSTKEVLDATLIHQSITGLYETRIDL
SQLGGDEGADKRTADGSEFESPKKKRKV

[0669] In some embodiments, the base editor is a fusion protein comprising a polynucleotide programmable nucleotide binding domain (e.g., Cas9-derived domain) fused to a nucleobase editing domain (e.g., all or a portion of a deaminase domain). In certain embodiments, the fusion proteins provided herein comprise one or more features that improve the base editing activity of the fusion proteins. For example, any of the fusion proteins provided herein may comprise a Cas9 domain that has reduced nuclease activity. In some embodiments, any of the fusion proteins provided herein may have a Cas9 domain that does not have nuclease activity (dCas9), or a Cas9 domain that cuts one strand of a duplexed DNA molecule, referred to as a Cas9 nickase (nCas9).

[0670] In some embodiments, the base editor further comprises a domain comprising all or a portion of a uracil glycosylase inhibitor (UGI). In some embodiments, the base editor comprises a domain comprising all or a portion of a uracil binding protein (UBP), such as a uracil DNA glycosylase (UDG). In some embodiments, the base editor comprises a domain comprising all or a portion of a nucleic acid polymerase. In some embodiments, a nucleic acid polymerase or portion thereof incorporated into a base editor is a translesion DNA polymerase.

[0671] In some embodiments, a domain of the base editor can comprise multiple domains. For example, the base editor comprising a polynucleotide programmable nucleotide binding domain derived from Cas9 can comprise an REC lobe and an NUC lobe corresponding to the REC lobe and NUC lobe of a wild-type or natural Cas9. In another example, the base editor can comprise one or more of a RuvCI domain, BH domain, REC1 domain, REC2 domain, RuvCII domain, L1 domain, HNH domain, L2 domain, RuvCIII domain, WED domain, TOPO domain or CTD domain. In some embodiments, one or more domains of the base editor comprise a mutation (e.g., substitution, insertion, deletion) relative to a wild-type version of a polypeptide comprising the domain. For example, an HNH domain of a polynucleotide programmable DNA binding domain can comprise an H840A substitution. In another example, a RuvCI domain of a polynucleotide programmable DNA binding domain can comprise a D10A substitution.

[0672] Different domains (e.g., adjacent domains) of the base editor disclosed herein can be connected to each other with or without the use of one or more linker domains (e.g., an XTEN linker domain). In some embodiments, a linker domain can be a bond (e.g., covalent bond), chemical group, or a molecule linking two molecules or moieties, e.g., two domains of a fusion protein, such as, for example, a first domain (e.g., Cas9-derived domain) and a second domain (e.g., an adenosine deaminase domain). In some embodiments, a linker is a covalent bond (e.g., a carbon-carbon bond, disulfide bond, carbon-hetero atom bond, etc.). In certain embodiments, a linker is a carbon nitrogen bond of an amide linkage. In certain embodiments, a linker is a cyclic or acyclic, substituted or unsubstituted, branched or unbranched aliphatic or heteroaliphatic linker. In certain embodiments, a linker is polymeric (e.g., polyethylene, polyethylene glycol, polyamide, polyester, etc.). In certain embodiments, a linker comprises a monomer, dimer, or polymer of aminoalkanoic acid. In some embodiments, a linker comprises an aminoalkanoic acid (e.g., glycine, ethanoic acid, alanine, beta-alanine, 3-aminopropanoic acid, 4-aminobutanoic acid, 5-pentanoic acid, etc.). In some embodiments, a linker comprises a monomer, dimer, or polymer of aminohexanoic acid (Ahx). In certain embodiments, a linker is based on a carbocyclic moiety (e.g., cyclopentane, cyclohexane). In other embodiments, a linker comprises a polyethylene glycol moiety (PEG). In certain embodiments, a linker comprises an aryl or heteroaryl moiety. In certain embodiments, the linker is based on a phenyl ring. A linker can include functionalized moieties to facilitate attachment of a nucleophile (e.g., thiol, amino) from the peptide to the linker. Any electrophile can be used as part of the linker. Exemplary electrophiles include, but are not limited to, activated esters, activated amides, Michael acceptors, alkyl halides, aryl halides, acyl halides, and isothiocyanates. In some embodiments, a linker j oins a gRNA binding domain of an RNA-programmable nuclease, including a Cas9 nuclease domain, and the catalytic domain of a nucleic acid editing protein. In some embodiments, a linker joins a dCas9 and a second domain (e.g., UGI, etc.).

[0673] Typically, a linker is positioned between, or flanked by, two groups, molecules, or other moieties and connected to each one via a covalent bond, thus connecting the two. In some embodiments, a linker is an amino acid or a plurality of amino acids (e.g., a peptide or protein). In some embodiments, a linker is an organic molecule, group, polymer, or chemical moiety. In some embodiments, a linker is 2-100 amino acids in length, for example, 2, 3, 4, 5, 6, 7, 8, 9, 10, 11, 12, 13, 14, 15, 16, 17, 18, 19, 20, 21, 22, 23, 24, 25, 26, 27, 28, 29, 30, 30-35, 35-40, 40-45, 45-50, 50-60, 60-70, 70-80, 80-90, 90-100, 100-150, or 150-200 amino acids in length. In some embodiments, the linker is about 3 to about 104 (e.g., 5, 6, 7, 8, 9, 10, 11, 12, 13, 14, 15, 16, 17, 18, 19, 20, 21, 22, 23, 24, 25, 26, 27, 28, 29, 30, 31, 32, 33, 34, 35, 36, 37, 38, 39, 40, 41, 42, 43, 44, 45, 46, 47, 48, 49, 50, 55, 60, 65, 70, 75, 80, 85, 90, 95, or 100) amino acids in length. Longer or shorter linkers are also contemplated. In some embodiments, a linker domain comprises the amino acid sequence SGSETPGTSESATPES (SEQ ID NO: 67), which can also be referred to as the XTEN linker. Any method for linking the fusion protein domains can be employed (e.g., ranging from very flexible linkers of the form (SGGS)n (SEQ ID NO: 278), (GGGS)n (SEQ ID NO: 279), (GGGGS)n (SEQ ID NO: 280), and (G)n, to more rigid linkers of the form (EAAAK)n (SEQ ID NO: 281), (GGS)n, SGSETPGTSESATPES (SEQ ID NO: 67) (see, e.g., Guilinger J P, Thompson D B, Liu D R. Fusion of catalytically inactive Cas9 to FokI nuclease improves the specificity of genome modification. Nat. Biotechnol. 2014; 32(6): 577-82; the entire contents are incorporated herein by reference), or (XP)ₙ motif, in order to achieve the optimal length for activity for the nucleobase editor. In some embodiments, n is 1, 2, 3, 4, 5, 6, 7, 8, 9, 10, 11, 12, 13, 14, or 15. In some embodiments, the linker comprises a (GGS)ₙ motif, wherein n is 1, 3, or 7 (SEQ ID NO: 282). In some embodiments, the Cas9 domain of the fusion proteins provided herein are fused via a linker comprising the amino acid sequence SGSETPGTSESATPES (SEQ ID NO: 67). In some embodiments, a linker comprises a plurality of proline residues and is 5-21, 5-14, 5-9, 5-7 amino acids in length, e.g., PAPAP (SEQ ID NO: 283), PAPAPA (SEQ ID NO: 284), PAPAPAP (SEQ ID NO: 285), PAPAPAPA (SEQ ID NO: 286), P(AP)₄ (SEQ ID NO: 287), P(AP)₇ (SEQ ID NO: 288), P(AP)₁₀ (SEQ ID NO: 289) (see, e.g., Tan J, Zhang F, Karcher D, Bock R. Engineering of high-precision base editors for site-specific single nucleotide replacement. Nat Commun. 2019 Jan. 25; 10(1):439; the entire contents are incorporated herein by reference). Such proline-rich linkers are also termed “rigid” linkers.

[0674] A fusion protein of the invention comprises a nucleic acid editing domain. In some embodiments, the deaminase is an adenosine deaminase. In some embodiments, the deaminase is a vertebrate deaminase. In some embodiments, the deaminase is an invertebrate deaminase. In some embodiments, the deaminase is a human, chimpanzee, gorilla, monkey, cow, dog, rat, or mouse deaminase. In some embodiments, the deaminase is a human deaminase. In some embodiments, the deaminase is a rat deaminase.

[0675] As used herein, “heterodimer” can refer to a fusion protein comprising a wild type TadA domain and a variant of TadA*7.10 domain or to two variant TadA domains (e.g., TadA7.10 and TadA7.10 with Y147T and Q154S alterations.

[0676] In some embodiments, the base editor comprises a fusion protein comprising a heterologous polypeptide fused internally or inserted in a napDNAbp. The heterologous polypeptide (e.g., deaminase) can be inserted in the napDNAbp (e.g., Cas9) at a suitable location, for example, such that the napDNAbp retains its ability to bind the target polynucleotide and a guide nucleic acid. A deaminase can be inserted into a napDNAbp without compromising function of the deaminase (e.g., base editing activity) or the napDNAbp (e.g., ability to bind to target nucleic acid and guide nucleic acid). A deaminase can be inserted in the napDNAbp at, for example, a disordered region or a region comprising a high temperature factor or B-factor as shown by crystallographic studies. Regions of a protein that are less ordered, disordered, or unstructured, for example solvent exposed regions and loops, can be used for insertion without compromising structure or function. A deaminase can be inserted in the napDNAbp in a flexible loop region or a solvent-exposed region. In some embodiments, the deaminase is inserted in a flexible loop of the Cas9 polypeptide.

[0677] In some embodiments, the insertion location of a deaminase is determined by B-factor analysis of the crystal structure of Cas9 polypeptide. In some embodiments, the deaminase is inserted in regions of the Cas9 polypeptide comprising higher than average B-factors (e.g., higher B factors compared to the total protein or the protein domain comprising the disordered region). B-factor or temperature factor can indicate the fluctuation of atoms from their average position (for example, as a result of temperature-dependent atomic vibrations or static disorder in a crystal lattice). A high B-factor (e.g., higher than average B-factor) for backbone atoms can be indicative of a region with relatively high local mobility. Such a region can be used for inserting a deaminase without compromising structure or function. A deaminase can be inserted at a location with a residue having a Cα atom with a B-factor that is 50%, 60%, 70%, 80%, 90%, 100%, 110%, 120%, 130%, 140%, 150%, 160%, 170%, 180%, 190%, 200%, or greater than 200% more than the average B-factor for the total protein. A deaminase can be inserted at a location with a residue having a Cα atom with a B-factor that is 50%, 60%, 70%, 80%, 90%, 100%, 110%, 120%, 130%, 140%, 150%, 160%, 170%, 180%, 190%, 200% or greater than 200% more than the average B-factor for a Cas9 protein domain comprising the residue. Cas9 polypeptide positions comprising a higher than average B-factor can include, for example, residues 768, 792, 1052, 1015, 1022, 1026, 1029, 1067, 1040, 1054, 1068, 1246, 1247, and 1248 as numbered in SEQ ID No:1. Cas9 polypeptide regions comprising a higher than average B-factor can include, for example, residues 792-872, 792-906, and 2-791 as numbered in SEQ ID No:1.

[0678] A heterologous polypeptide (e.g., deaminase) can be inserted in the napDNAbp at an amino acid residue selected from the group consisting of: 768, 791, 792, 1015, 1016, 1022, 1023, 1026, 1029, 1040, 1052, 1054, 1067, 1068, 1069, 1246, 1247, and 1248 as numbered in SEQ ID NO: 1, or a corresponding amino acid residue in another Cas9 polypeptide. In some embodiments, the heterologous polypeptide is inserted between amino acid positions 768-769, 791-792, 792-793, 1015-1016, 1022-1023, 1026-1027, 1029-1030, 1040-1041, 1052-1053, 1054-1055, 1067-1068, 1068-1069, 1247-1248, or 1248-1249 as numbered in SEQ ID NO: 1 or corresponding amino acid positions thereof. In some embodiments, the heterologous polypeptide is inserted between amino acid positions 769-770, 792-793, 793-794, 1016-1017, 1023-1024, 1027-1028, 1030-1031, 1041-1042, 1053-1054, 1055-1056, 1068-1069, 1069-1070, 1248-1249, or 1249-1250 as numbered in SEQ ID NO: 1 or corresponding amino acid positions thereof. In some embodiments, the heterologous polypeptide replaces an amino acid residue selected from the group consisting of: 768, 791, 792, 1015, 1016, 1022, 1023, 1026, 1029, 1040, 1052, 1054, 1067, 1068, 1069, 1246, 1247, and 1248 as numbered in SEQ ID NO: 1, or a corresponding amino acid residue in another Cas9 polypeptide. It should be understood that the reference to SEQ ID NO:1 with respect to insertion positions is for illustrative purpose. The insertions as discussed herein are not limited to the Cas9 polypeptide sequence of SEQ ID NO: 1, but include insertion at corresponding locations in variant Cas9 polypeptides, for example a Cas9 nickase (nCas9), nuclease dead Cas9 (dCas9), a Cas9 variant lacking a nuclease domain, a truncated Cas9, or a Cas9 domain lacking partial or complete HNH domain.

[0679] A heterologous polypeptide (e.g., deaminase) can be inserted in the napDNAbp at an amino acid residue selected from the group consisting of: 768, 792, 1022, 1026, 1040, 1068, and 1247 as numbered in SEQ ID NO: 1, or a corresponding amino acid residue in another Cas9 polypeptide. In some embodiments, the heterologous polypeptide is inserted between amino acid positions 768-769, 792-793, 1022-1023, 1026-1027, 1029-1030, 1040-1041, 1068-1069, or 1247-1248 as numbered in SEQ ID NO: 1 or corresponding amino acid positions thereof. In some embodiments, the heterologous polypeptide is inserted between amino acid positions 769-770, 793-794, 1023-1024, 1027-1028, 1030-1031, 1041-1042, 1069-1070, or 1248-1249 as numbered in SEQ ID NO: 1 or corresponding amino acid positions thereof. In some embodiments, the heterologous polypeptide replaces an amino acid residue selected from the group consisting of: 768, 792, 1022, 1026, 1040, 1068, and 1247 as numbered in SEQ ID NO: 1, or a corresponding amino acid residue in another Cas9 polypeptide.

[0680] In some embodiments, an ABE (e.g., TadA) is inserted at an amino acid residue selected from the group consisting of: 1015, 1022, 1029, 1040, 1068, 1247, 1054, 1026, 768, 1067, 1248, 1052, and 1246 as numbered in SEQ ID NO: 1, or a corresponding amino acid residue in another Cas9 polypeptide. In some embodiments, an ABE (e.g., TadA) is inserted in place of residues 792-872, 792-906, or 2-791 as numbered in SEQ ID NO: 1, or a corresponding amino acid residue in another Cas9 polypeptide. In some embodiments, the ABE is inserted at the N-terminus of an amino acid selected from the group consisting of: 1015, 1022, 1029, 1040, 1068, 1247, 1054, 1026, 768, 1067, 1248, 1052, and 1246 as numbered in SEQ ID NO: 1, or a corresponding amino acid residue in another Cas9 polypeptide. In some embodiments, the ABE is inserted at the C-terminus of an amino acid selected from the group consisting of: 1015, 1022, 1029, 1040, 1068, 1247, 1054, 1026, 768, 1067, 1248, 1052, and 1246 as numbered in SEQ ID NO: 1, or a corresponding amino acid residue in another Cas9 polypeptide. In some embodiments, the ABE is inserted to replace an amino acid selected from the group consisting of: 1015, 1022, 1029, 1040, 1068, 1247, 1054, 1026, 768, 1067, 1248, 1052, and 1246 as numbered in SEQ ID NO: 1, or a corresponding amino acid residue in another Cas9 polypeptide.

[0681] In some embodiments, a CBE (e.g., APOBEC1) is inserted at an amino acid residue selected from the group consisting of: 1016, 1023, 1029, 1040, 1069, and 1247 as numbered in SEQ ID NO: 1, or a corresponding amino acid residue in another Cas9 polypeptide. In some embodiments, the ABE is inserted at the N-terminus of an amino acid selected from the group consisting of: 1016, 1023, 1029, 1040, 1069, and 1247 as numbered in SEQ ID NO: 1, or a corresponding amino acid residue in another Cas9 polypeptide. In some embodiments, the ABE is inserted at the C-terminus of an amino acid selected from the group consisting of: 1016, 1023, 1029, 1040, 1069, and 1247 as numbered in SEQ ID NO: 1, or a corresponding amino acid residue in another Cas9 polypeptide. In some embodiments, the ABE is inserted to replace an amino acid selected from the group consisting of: 1016, 1023, 1029, 1040, 1069, and 1247 as numbered in SEQ ID NO: 1, or a corresponding amino acid residue in another Cas9 polypeptide.

[0682] In some embodiments, the deaminase is inserted at amino acid residue 768 as numbered in SEQ ID NO: 1, or a corresponding amino acid residue in another Cas9 polypeptide. In some embodiments, the ABE is inserted at the N-terminus of amino acid 768 as numbered in SEQ ID NO: 1, or a corresponding amino acid residue in another Cas9 polypeptide. In some embodiments, the ABE is inserted at the C-terminus of amino acid 768 as numbered in SEQ ID NO: 1, or a corresponding amino acid residue in another Cas9 polypeptide. In some embodiments, the ABE is inserted to replace amino acid 768 as numbered in SEQ ID NO: 1, or a corresponding amino acid residue in another Cas9 polypeptide.

[0683] In some embodiments, the deaminase is inserted at amino acid residue 791 as numbered in SEQ ID NO: 1, or a corresponding amino acid residue in another Cas9 polypeptide. In some embodiments, the ABE is inserted at the N-terminus of amino acid 791 as numbered in SEQ ID NO: 1, or a corresponding amino acid residue in another Cas9 polypeptide. In some embodiments, the ABE is inserted at the C-terminus of amino acid 791 as numbered in SEQ ID NO: 1, or a corresponding amino acid residue in another Cas9 polypeptide. In some embodiments, the ABE is inserted to replace amino acid 791 as numbered in SEQ ID NO: 1, or a corresponding amino acid residue in another Cas9 polypeptide.

[0684] In some embodiments, the deaminase is inserted at amino acid residue 792 as numbered in SEQ ID NO: 1, or a corresponding amino acid residue in another Cas9 polypeptide. In some embodiments, the ABE is inserted at the N-terminus of amino acid 792 as numbered in SEQ ID NO: 1, or a corresponding amino acid residue in another Cas9 polypeptide. In some embodiments, the ABE is inserted at the C-terminus of amino acid 792 as numbered in SEQ ID NO: 1, or a corresponding amino acid residue in another Cas9 polypeptide. In some embodiments, the ABE is inserted to replace amino acid 792 as numbered in SEQ ID NO: 1, or a corresponding amino acid residue in another Cas9 polypeptide.

[0685] In some embodiments, the deaminase is inserted at amino acid residue 1016 as numbered in SEQ ID NO: 1, or a corresponding amino acid residue in another Cas9 polypeptide. In some embodiments, the ABE is inserted at the N-terminus of amino acid 1016 as numbered in SEQ ID NO: 1, or a corresponding amino acid residue in another Cas9 polypeptide. In some embodiments, the ABE is inserted at the C-terminus of amino acid 1016 as numbered in SEQ ID NO: 1, or a corresponding amino acid residue in another Cas9 polypeptide. In some embodiments, the ABE is inserted to replace amino acid 1016 as numbered in SEQ ID NO: 1, or a corresponding amino acid residue in another Cas9 polypeptide.

[0686] In some embodiments, the deaminase is inserted at amino acid residue 1022 as numbered in SEQ ID NO: 1, or a corresponding amino acid residue in another Cas9 polypeptide. In some embodiments, the ABE is inserted at the N-terminus of amino acid 1022 as numbered in SEQ ID NO: 1, or a corresponding amino acid residue in another Cas9 polypeptide. In some embodiments, the ABE is inserted at the C-terminus of amino acid 1022 as numbered in SEQ ID NO: 1, or a corresponding amino acid residue in another Cas9 polypeptide. In some embodiments, the ABE is inserted to replace amino acid 1022 as numbered in SEQ ID NO: 1, or a corresponding amino acid residue in another Cas9 polypeptide.

[0687] In some embodiments, the deaminase is inserted at amino acid residue 1023 as numbered in SEQ ID NO: 1, or a corresponding amino acid residue in another Cas9 polypeptide. In some embodiments, the ABE is inserted at the N-terminus of amino acid 1023 as numbered in SEQ ID NO: 1, or a corresponding amino acid residue in another Cas9 polypeptide. In some embodiments, the ABE is inserted at the C-terminus of amino acid 1023 as numbered in SEQ ID NO: 1, or a corresponding amino acid residue in another Cas9 polypeptide. In some embodiments, the ABE is inserted to replace amino acid 1023 as numbered in SEQ ID NO: 1, or a corresponding amino acid residue in another Cas9 polypeptide.

[0688] In some embodiments, the deaminase is inserted at amino acid residue 1026 as numbered in SEQ ID NO: 1, or a corresponding amino acid residue in another Cas9 polypeptide. In some embodiments, the ABE is inserted at the N-terminus of amino acid 1026 as numbered in SEQ ID NO: 1, or a corresponding amino acid residue in another Cas9 polypeptide. In some embodiments, the ABE is inserted at the C-terminus of amino acid 1026 as numbered in SEQ ID NO: 1, or a corresponding amino acid residue in another Cas9 polypeptide. In some embodiments, the ABE is inserted to replace amino acid 1026 as numbered in SEQ ID NO: 1, or a corresponding amino acid residue in another Cas9 polypeptide.

[0689] In some embodiments, the deaminase is inserted at amino acid residue 1029 as numbered in SEQ ID NO: 1, or a corresponding amino acid residue in another Cas9 polypeptide. In some embodiments, the ABE is inserted at the N-terminus of amino acid 1029 as numbered in SEQ ID NO: 1, or a corresponding amino acid residue in another Cas9 polypeptide. In some embodiments, the ABE is inserted at the C-terminus of amino acid 1029 as numbered in SEQ ID NO: 1, or a corresponding amino acid residue in another Cas9 polypeptide. In some embodiments, the ABE is inserted to replace amino acid 1029 as numbered in SEQ ID NO: 1, or a corresponding amino acid residue in another Cas9 polypeptide.

[0690] In some embodiments, the deaminase is inserted at amino acid residue 1040 as numbered in SEQ ID NO: 1, or a corresponding amino acid residue in another Cas9 polypeptide. In some embodiments, the ABE is inserted at the N-terminus of amino acid 140 as numbered in SEQ ID NO: 1, or a corresponding amino acid residue in another Cas9 polypeptide. In some embodiments, the ABE is inserted at the C-terminus of amino acid 1040 as numbered in SEQ ID NO: 1, or a corresponding amino acid residue in another Cas9 polypeptide. In some embodiments, the ABE is inserted to replace amino acid 1040 as numbered in SEQ ID NO: 1, or a corresponding amino acid residue in another Cas9 polypeptide.

[0691] In some embodiments, the deaminase is inserted at amino acid residue 1052 as numbered in SEQ ID NO: 1, or a corresponding amino acid residue in another Cas9 polypeptide. In some embodiments, the ABE is inserted at the N-terminus of amino acid 1052 as numbered in SEQ ID NO: 1, or a corresponding amino acid residue in another Cas9 polypeptide. In some embodiments, the ABE is inserted at the C-terminus of amino acid 1052 as numbered in SEQ ID NO: 1, or a corresponding amino acid residue in another Cas9 polypeptide. In some embodiments, the ABE is inserted to replace amino acid 1052 as numbered in SEQ ID NO: 1, or a corresponding amino acid residue in another Cas9 polypeptide.

[0692] In some embodiments, the deaminase is inserted at amino acid residue 1054 as numbered in SEQ ID NO: 1, or a corresponding amino acid residue in another Cas9 polypeptide. In some embodiments, the ABE is inserted at the N-terminus of amino acid 1054 as numbered in SEQ ID NO: 1, or a corresponding amino acid residue in another Cas9 polypeptide. In some embodiments, the ABE is inserted at the C-terminus of amino acid 1054 as numbered in SEQ ID NO: 1, or a corresponding amino acid residue in another Cas9 polypeptide. In some embodiments, the ABE is inserted to replace amino acid 1054 as numbered in SEQ ID NO: 1, or a corresponding amino acid residue in another Cas9 polypeptide.

[0693] In some embodiments, the deaminase is inserted at amino acid residue 1067 as numbered in SEQ ID NO: 1, or a corresponding amino acid residue in another Cas9 polypeptide. In some embodiments, the ABE is inserted at the N-terminus of amino acid 1067 as numbered in SEQ ID NO: 1, or a corresponding amino acid residue in another Cas9 polypeptide. In some embodiments, the ABE is inserted at the C-terminus of amino acid 1067 as numbered in SEQ ID NO: 1, or a corresponding amino acid residue in another Cas9 polypeptide. In some embodiments, the ABE is inserted to replace amino acid 1067 as numbered in SEQ ID NO: 1, or a corresponding amino acid residue in another Cas9 polypeptide.

[0694] In some embodiments, the deaminase is inserted at amino acid residue 1068 as numbered in SEQ ID NO: 1, or a corresponding amino acid residue in another Cas9 polypeptide. In some embodiments, the ABE is inserted at the N-terminus of amino acid 1068 as numbered in SEQ ID NO: 1, or a corresponding amino acid residue in another Cas9 polypeptide. In some embodiments, the ABE is inserted at the C-terminus of amino acid 1068 as numbered in SEQ ID NO: 1, or a corresponding amino acid residue in another Cas9 polypeptide. In some embodiments, the ABE is inserted to replace amino acid 1068 as numbered in SEQ ID NO: 1, or a corresponding amino acid residue in another Cas9 polypeptide.

[0695] In some embodiments, the deaminase is inserted at amino acid residue 1069 as numbered in SEQ ID NO: 1, or a corresponding amino acid residue in another Cas9 polypeptide. In some embodiments, the ABE is inserted at the N-terminus of amino acid 1069 as numbered in SEQ ID NO: 1, or a corresponding amino acid residue in another Cas9 polypeptide. In some embodiments, the ABE is inserted at the C-terminus of amino acid 1069 as numbered in SEQ ID NO: 1, or a corresponding amino acid residue in another Cas9 polypeptide. In some embodiments, the ABE is inserted to replace amino acid 1069 as numbered in SEQ ID NO: 1, or a corresponding amino acid residue in another Cas9 polypeptide.

[0696] In some embodiments, the deaminase is inserted at amino acid residue 1246 as numbered in SEQ ID NO: 1, or a corresponding amino acid residue in another Cas9 polypeptide. In some embodiments, the ABE is inserted at the N-terminus of amino acid 1246 as numbered in SEQ ID NO: 1, or a corresponding amino acid residue in another Cas9 polypeptide. In some embodiments, the ABE is inserted at the C-terminus of amino acid 1246 as numbered in SEQ ID NO: 1, or a corresponding amino acid residue in another Cas9 polypeptide. In some embodiments, the ABE is inserted to replace amino acid 1246 as numbered in SEQ ID NO: 1, or a corresponding amino acid residue in another Cas9 polypeptide.

[0697] In some embodiments, the deaminase is inserted at amino acid residue 1247 as numbered in SEQ ID NO: 1, or a corresponding amino acid residue in another Cas9 polypeptide. In some embodiments, the ABE is inserted at the N-terminus of amino acid 1247 as numbered in SEQ ID NO: 1, or a corresponding amino acid residue in another Cas9 polypeptide. In some embodiments, the ABE is inserted at the C-terminus of amino acid 1247 as numbered in SEQ ID NO: 1, or a corresponding amino acid residue in another Cas9 polypeptide. In some embodiments, the ABE is inserted to replace amino acid 1247 as numbered in SEQ ID NO: 1, or a corresponding amino acid residue in another Cas9 polypeptide.

[0698] In some embodiments, the deaminase is inserted at amino acid residue 1248 as numbered in SEQ ID NO: 1, or a corresponding amino acid residue in another Cas9 polypeptide. In some embodiments, the ABE is inserted at the N-terminus of amino acid 1248 as numbered in SEQ ID NO: 1, or a corresponding amino acid residue in another Cas9 polypeptide. In some embodiments, the ABE is inserted at the C-terminus of amino acid 1248 as numbered in SEQ ID NO: 1, or a corresponding amino acid residue in another Cas9 polypeptide. In some embodiments, the ABE is inserted to replace amino acid 1248 as numbered in SEQ ID NO: 1, or a corresponding amino acid residue in another Cas9 polypeptide.

[0699] In some embodiments, a heterologous polypeptide (e.g., deaminase) is inserted in a flexible loop of a Cas9 polypeptide. The flexible loop portions can be selected from the group consisting of 530-537, 569-570, 686-691, 943-947, 1002-1025, 1052-1077, 1232-1247, or 1298-1300 as numbered in SEQ ID NO: 1, or a corresponding amino acid residue in another Cas9 polypeptide. The flexible loop portions can be selected from the group consisting of: 1-529, 538-568, 580-685, 692-942, 948-1001, 1026-1051, 1078-1231, or 1248-1297 as numbered in SEQ ID NO: 1, or a corresponding amino acid residue in another Cas9 polypeptide.

[0700] A heterologous polypeptide (e.g., deaminase) can be inserted into a Cas9 polypeptide region corresponding to amino acid residues: 1017-1069, 1242-1247, 1052-1056, 1060-1077, 1002-1003, 943-947, 530-537, 568-579, 686-691,1242-1247, 1298-1300, 1066-1077, 1052-1056, or 1060-1077 as numbered in SEQ ID NO: 1, or a corresponding amino acid residue in another Cas9 polypeptide.

[0701] A heterologous polypeptide (e.g., deaminase) can be inserted in place of a deleted region of a Cas9 polypeptide. The deleted region can correspond to an N-terminal or C-terminal portion of the Cas9 polypeptide. In some embodiments, the deleted region corresponds to residues 792-872 as numbered in SEQ ID NO: 1, or a corresponding amino acid residue in another Cas9 polypeptide. In some embodiments, the deleted region corresponds to residues 792-906 as numbered in SEQ ID NO: 1, or a corresponding amino acid residue in another Cas9 polypeptide. In some embodiments, the deleted region corresponds to residues 2-791 as numbered in SEQ ID NO: 1, or a corresponding amino acid residue in another Cas9 polypeptide.

[0702] A heterologous polypeptide (e.g., deaminase) can be inserted within a structural or functional domain of a Cas9 polypeptide. A heterologous polypeptide (e.g., deaminase) can be inserted between two structural or functional domains of a Cas9 polypeptide. A heterologous polypeptide (e.g., deaminase) can be inserted in place of a structural or functional domain of a Cas9 polypeptide, for example, after deleting the domain from the Cas9 polypeptide. The structural or functional domains of a Cas9 polypeptide can include, for example, RuvC I, RuvC II, RuvC III, Rec1, Rec2, PI, or HNH.

[0703] In some embodiments, the Cas9 polypeptide lacks one or more domains selected from the group consisting of: RuvC I, RuvC II, RuvC III, Rec1, Rec2, PI, or HNH domain. In some embodiments, the Cas9 polypeptide lacks a nuclease domain. In some embodiments, the Cas9 polypeptide lacks a HNH domain. In some embodiments, the Cas9 polypeptide lacks a portion of the HNH domain such that the Cas9 polypeptide has reduced or abolished HNH activity.

[0704] In some embodiments, the Cas9 polypeptide comprises a deletion of the nuclease domain and the deaminase is inserted to replace the nuclease domain. In some embodiments, the HNH domain is deleted and the deaminase is inserted in its place. In some embodiments, one or more of the RuvC domains is deleted and the deaminase is inserted in its place.

[0705] A fusion protein comprising a heterologous polypeptide can be flanked by a N-terminal and a C-terminal fragment of a napDNAbp. In some embodiments, the fusion protein comprises a deaminase flanked by a N-terminal fragment and a C-terminal fragment of a Cas9 polypeptide. The N terminal fragment or the C terminal fragment can bind the target polynucleotide sequence. The C-terminus of the N terminal fragment or the N-terminus of the C terminal fragment can comprise a part of a flexible loop of a Cas9 polypeptide. The C-terminus of the N terminal fragment or the N-terminus of the C terminal fragment can comprise a part of an alpha-helix structure of the Cas9 polypeptide. The N-terminal fragment or the C-terminal fragment can comprise a DNA binding domain. The N-terminal fragment or the C-terminal fragment can comprise a RuvC domain. The N-terminal fragment or the C-terminal fragment can comprise a HNH domain. In some embodiments, neither of the N-terminal fragment and the C-terminal fragment comprises a HNH domain.

[0706] In some embodiments, the C-terminus of the N terminal Cas9 fragment comprises an amino acid that is in proximity to a target nucleobase when the fusion protein deaminates the target nucleobase. In some embodiments, the N-terminus of the C terminal Cas9 fragment comprises an amino acid that is in proximity to a target nucleobase when the fusion protein deaminates the target nucleobase. The insertion location of different deaminases can be different in order to have proximity between the target nucleobase and an amino acid in the C-terminus of the N terminal Cas9 fragment or the N-terminus of the C terminal Cas9 fragment. For example, the insertion position of an ABE can be at an amino acid residue selected from the group consisting of: 1015, 1022, 1029, 1040, 1068, 1247, 1054, 1026, 768, 1067, 1248, 1052, and 1246 as numbered in SEQ ID NO: 1, or a corresponding amino acid residue in another Cas9 polypeptide. A suitable insertion position of a CBE can be an amino acid residue selected from the group consisting of: 1016, 1023, 1029, 1040, 1069, and 1247 as numbered in SEQ ID NO: 1, or a corresponding amino acid residue in another Cas9 polypeptide. In certain embodiments, the insertion of the ABE can be inserted to the N terminus or the C terminus of any one of the above listed amino acid residues. In some embodiemnts, the insertion of the ABE can be inserted to replace any one of the above listed amino acid residues.

[0707] The N-terminal Cas9 fragment of a fusion protein (i.e. the N-terminal Cas9 fragment flanking the deaminase in a fusion protein) can comprise the N-terminus of a Cas9 polypeptide. The N-terminal Cas9 fragment of a fusion protein can comprise a length of at least about: 100, 200, 300, 400, 500, 600, 700, 800, 900, 1000, 1100, 1200, or 1300 amino acids. The N-terminal Cas9 fragment of a fusion protein can comprise a sequence corresponding to amino acid residues: 1-56, 1-95, 1-200, 1-300, 1-400, 1-500, 1-600, 1-700, 1-718, 1-765, 1-780, 1-906, 1-918, or 1-1100 as numbered in SEQ ID NO: 1, or a corresponding amino acid residue in another Cas9 polypeptide. The N-terminal Cas9 fragment can comprise a sequence comprising at least: 85%, at least 90%, at least 91%, at least 92%, at least 93%, at least 94%, at least 95%, at least 96%, at least 97%, at least 98%, at least 99%, or at least 99.5% sequence identity to amino acid residues: 1-56, 1-95, 1-200, 1-300, 1-400, 1-500, 1-600, 1-700, 1-718, 1-765, 1-780, 1-906, 1-918, or 1-1100 as numbered in SEQ ID NO: 1, or a corresponding amino acid residue in another Cas9 polypeptide.

[0708] The C-terminal Cas9 fragment of a fusion protein (i.e. the C-terminal Cas9 fragment flanking the deaminase in a fusion protein) can comprise the C-terminus of a Cas9 polypeptide. The C-terminal Cas9 fragment of a fusion protein can comprise a length of at least about: 100, 200, 300, 400, 500, 600, 700, 800, 900, 1000, 1100, 1200, or 1300 amino acids. The C-terminal Cas9 fragment of a fusion protein can comprise a sequence corresponding to amino acid residues: 1099-1368, 918-1368, 906-1368, 780-1368, 765-1368, 718-1368, 94-1368, or 56-1368 as numbered in SEQ ID NO: 1, or a corresponding amino acid residue in another Cas9 polypeptide. The N-terminal Cas9 fragment can comprise a sequence comprising at least: 85%, at least 90%, at least 91%, at least 92%, at least 93%, at least 94%, at least 95%, at least 96%, at least 97%, at least 98%, at least 99%, or at least 99.5% sequence identity to amino acid residues: 1099-1368, 918-1368, 906-1368, 780-1368, 765-1368, 718-1368, 94-1368, or 56-1368 as numbered in SEQ ID NO: 1, or a corresponding amino acid residue in another Cas9 polypeptide.

[0709] The N-terminal Cas9 fragment and C-terminal Cas9 fragment of a fusion protein taken together may not correspond to a full-length naturally occurring Cas9 polypeptide sequence, for example, as set forth in SEQ ID NO: 1.

[0710] The fusion protein described herein can effect targeted deamination with reduced deamination at non-target sites (e.g., off-target sites), such as reduced genome wide spurious deamination. The fusion protein described herein can effect targeted deamination with reduced bystander deamination at non-target sites. The undesired deamination or off-target deamination can be reduced by at least 30%, at least 40%, at least 50%, at least 60%, at least 70%, at least 80%, at least 90%, at least 95%, or at least 99% compared with, for example, an end terminus fusion protein comprising the deaminase fused to a N terminus or a C terminus of a Cas9 polypeptide. The undesired deamination or off-target deamination can be reduced by at least one-fold, at least two-fold, at least three-fold, at least four-fold, at least five-fold, at least tenfold, at least fifteen fold, at least twenty fold, at least thirty fold, at least forty fold, at least fifty fold, at least 60 fold, at least 70 fold, at least 80 fold, at least 90 fold, or at least hundred fold, compared with, for example, an end terminus fusion protein comprising the deaminase fused to a N terminus or a C terminus of a Cas9 polypeptide.

[0711] In some embodiments, the deaminase of the fusion protein deaminates no more than two nucleobases within the range of a R-loop. In some embodiments, the deaminase of the fusion protein deaminates no more than three nucleobases within the range of the R-loop. In some embodiments, the deaminase of the fusion protein deaminates no more than 2, 3, 4, 5, 6, 7, 8, 9, or 10 nucleobases within the range of the R-loop. A R-loop is a three-stranded nucleic acid structure including a DNA:RNA hybrid, a DNA:DNA or a RNA:RNA complementary structure and the associated with single-stranded DNA. As used herein, a R-loop may be formed when a target polynucleotide is contacted with a CRISPR complex or a base editing complex, wherein a portion of a guide polynucleotide, e.g. a guide RNA, hybridizes with and displaces with a portion of a target polynucleotide, e.g. a target DNA. In some embodiments, a R-loop comprises a hybridized region of a spacer sequence and a target DNA complementary sequence. A R-loop region may be of about 5, 6, 7, 8, 9, 10, 11, 12, 13, 14, 15, 16, 17, 18, 19, 20, 21, 22, 23, 24, 25, 26, 27, 28, 29, 30, 31, 32, 33, 34, 35, 36, 37, 38, 39, 40, 41, 42, 43, 44, 45, 46, 47, 48, 49, or 50 nuclebase pairs in length. In some embodiments, the R-loop region is about 20 nucleobase pairs in length. It should be understood that, as used herein, a R-loop region is not limited to the target DNA strand that hybridizes with the gudie polynucleotide. For example, editing of a target nucleobase within a R-loop region may be to a DNA strand that comprises the complementary strand to a guide RNA or may be to a DNA strand that is the opposing strand of the strand complementary to the guide RNA. In some embodiments, editing in the region of the R-loop comprises editing a nucleobase on non-complementary strand (protospacer strand) to a guide RNA in a target DNA sequence.

[0712] The fusion protein described herein can effect target deamination in an editing window different from canonical base editing. In some embodiments, a target nucleobase is from about 1 to about 20 bases upstream of a PAM sequence in the target polynucleotide sequence. In some embodiments, a target nucleobase is from about 2 to about 12 bases upstream of a PAM sequence in the target polynucleotide sequence. In some embodiments, a target nucleobase is from about 1 to 9 base pairs, about 2 to 10 base pairs, about 3 to 11 base pairs, about 4 to 12 base pairs, about 5 to 13 base pairs, about 6 to 14 base paris, about 7 to 15 base pairs, about 8 to 16 base pairs, about 9 to 17 base pairs, about 10 to 18 base pairs, about 11 to 19 base pairs, about 12 to 20 base pairs, about 1 to 7 base pairs, about 2 to 8 base pairs, about 3 to 9 base pairs, about 4 to 10 base pairs, about 5 to 11 base pairs, about 6 to 12 base pairs, about 7 to 13 base pairs, about 8 to 14 base pairs, about 9 to 15 base pairs, about 10 to 16 base pairs, about 11 to 17 base pairs, about 12 to 18 base pairs, about 13 to 19 base pairs, about 14 to 20 base pairs, about 1 to 5 base pairs, about 2 to 6 base pairs, about 3 to 7 base pairs, about 4 to 8 base pairs, about 5 to 9 base pairs, about 6 to 10 base pairs, about 7 to 11 base pairs, about 8 to 12 base pairs, about 9 to 13 base pairs, about 10 to 14 base pairs, about 11 to 15 base pairs, about 12 to 16 base paris, about 13 to 17 base paris, about 14 to 18 base pairs, about 15 to 19 base pairs, about 16 to 20 base pairs, about 1 to 3 base pairs, about 2 to 4 base pairs, about 3 to 5 base pairs, about 4 to 6 base pairs, about 5 to 7 base pairs, about 6 to 8 base pairs, about 7 to 9 base pairs, about 8 to 10 base pairs, about 9 to 11 base pairs, about 10 to 12 base pairs, about 11 to 13 base pairs, about 12 to 14 base pairs, about 13 to 15 base pairs, about 14 to 16 base pairs, about 15 to 17 base pairs, about 16 to 18 base pairs, about 17 to 19 base pairs, about 18 to 20 base pairs away or upstream of the PAM sequence. In some embodiments, a target nucleobase is about 1, 2, 3, 4, 5, 6, 7, 8, 9, 10, 11, 12, 13, 14, 15, 16, 17, 18, 19, 20, or more base pairs away or upstream of the PAM sequence. In some embodiemtns, a target nucleobase is about 1, 2, 3, 4, 5, 6, 7, 8, or 9 base pairs upstream of the PAM sequence. In some embodiments, a target nucleobase is about 2, 3, 4, or 6 base pairs upstream of the PAM sequence.

[0713] Accordingly, also provided herein are fusion protein libraries and method for using same to optimize base editing that allow for alternative preferred base editing windows compared to canonical base editors, e.g. BE4. In some embodiments, the disclosure provides a protein library for optimized base editing comprising a plurality of fusion proteins, wherein each one of the plurality of fusion proteins comprises a deaminase flanked by a N-terminal fragment and a C-terminal fragment of a Cas9 polypeptide, wherein the N-terminal fragment of each one of the fusion proteins differs from the N-terminal fragments of the rest of the plurality of fusion proteins or wherein the C-terminal fragment of each one of the fusion proteins differs from the C-terminal fragments of the rest of the plurality of fusion proteins, wherein the deaminase of each one of the fusion proteins deaminates a target nucleobase in proximity to a Protospacer Adjacent Motif (PAM) sequence in a target polynucleotide sequence, and wherein the N terminal fragment or the C terminal fragment binds the target polynucleotide sequence. In some embodiments, for each nucleobase within a CRISPR R-loop, at least one of the plurality of fusion proteins deaminates the nucleobase. In some embodiments, for each nucleobase within of a target polynucleotide from 1 to 20 base pairs away of a PAM sequence, at least one of the plurality of fusion proteins deaminates the nucleobase. In some embodiments, provided herein is a kit comprising the fusion protein library that allows for optimized base editing.

[0714] The fusion protein can comprise more than one heterologous polypeptide. For example, the fusion protein can additionally comprise one or more UGI domains and/or one or more nuclear localization signals. The two or more heterologous domains can be inserted in tandem. The two or more heterologous domains can be inserted at locations such that they are not in tandem in the NapDNAbp.

[0715] In some embodiments, the base editor comprises a fusion protein comprising a napDNAbp domain (e.g., Cas12-derived domain) with an internally fused nucleobase editing domain (e.g., all or a portion of a deaminase domain). In some embodiments, the napDNAbp is a Cas12b. In some embodiments, the base editor comprises a BhCas12b domain with an internally fused TadA*8 domain inserted at the loci provided in the Table A below.

TABLE A
Insertion loci in Cas12b proteins

| | | Inserted |
|---|---|---|
| | Insertion site | between aa |
| BhCas12b | | |
| position 1 | 153 | PS |
| position 2 | 255 | KE |
| position 3 | 306 | DE |
| position 4 | 980 | DG |
| position 5 | 1019 | KL |
| position 6 | 534 | FP |
| position 7 | 604 | KG |
| position 8 | 344 | HF |
| BvCas12b | | |
| position 1 | 147 | PD |
| position 2 | 248 | GG |
| position 3 | 299 | PE |
| position 4 | 991 | GE |
| position 5 | 1031 | KM |
| AaCas12b | | |
| position 1 | 157 | PG |
| position 2 | 258 | VG |
| position 3 | 310 | DP |
| position 4 | 1008 | GE |
| position 5 | 1044 | GK |

[0716] In some embodiments, a base editor can comprise multiple domains. For example, the base editor comprising a napDNAbp domain derived from a Cas12 protein can comprise an REC lobe and an NUC lobe corresponding to the REC lobe and NUC lobe of a wild-type or natural Cas12. In another example, the base editor can comprise one or more of a RuvC domainWED domain. In some embodiments, one or more domains of the base editor comprise a mutation (e.g., substitution, insertion, deletion) relative to a wild type version of a polypeptide comprising the domain.

[0717] A fusion protein of the invention comprises a nucleic acid editing domain. In some embodiments, the nucleic acid editing domain can catalyze a C to U base change. In some embodiments, the nucleic acid editing domain is a deaminase domain. In some embodiments, the deaminase is a cytidine deaminase or an adenosine deaminase. In some embodiments, the deaminase is an apolipoprotein B mRNA-editing complex (APOBEC) family deaminase. In some embodiments, the deaminase is an APOBEC1 deaminase. In some embodiments, the deaminase is an APOBEC2 deaminase. In some embodiments, the deaminase is an APOBEC3 deaminase. In some embodiments, the deaminase is an APOBEC3 A deaminase. In some embodiments, the deaminase is an APOBEC3B deaminase. In some embodiments, the deaminase is an APOBEC3C deaminase. In some embodiments, the deaminase is an APOBEC3D deaminase. In some embodiments, the deaminase is an APOBEC3E deaminase. In some embodiments, the deaminase is an APOBEC3F deaminase. In some embodiments, the deaminase is an APOBEC3G deaminase. In some embodiments, the deaminase is an APOBEC3H deaminase. In some embodiments, the deaminase is an APOBEC4 deaminase.

[0718] In some embodiments, the deaminase is an activation-induced deaminase (AID).

[0719] In some embodiments, the deaminase is a vertebrate deaminase. In some embodiments, the deaminase is an invertebrate deaminase. In some embodiments, the deaminase is a human, chimpanzee, gorilla, monkey, cow, dog, rat, or mouse deaminase. In some embodiments, the deaminase is a human deaminase. In some embodiments, the deaminase is a rat deaminase, e.g., rAPOBEC1. In some embodiments, the deaminase is a Petromyzon marinus cytidine deaminase 1 (pmCDA1). In some embodiments, the deaminase is a human APOBEC3G. In some embodiments, the deaminase is a fragment of the human APOBEC3G. In some embodiments, the deaminase is a human APOBEC3G variant comprising a D316R and a D317R mutation. In some embodiments, the deaminase is a fragment of the human APOBEC3G and comprising mutations corresponding to the D316R and D317R mutations. In some embodiments, the nucleic acid editing domain is at least 80%, at least 85%, at least 90%, at least 92%, at least 95%, at least 96%, at least 97%, at least 98%, at least 99%), or at least 99.5% identical to the deaminase domain of any deaminase described herein.

### Linkers

[0720] In certain embodiments, linkers may be used to link any of the peptides or peptide domains of the invention. The linker may be as simple as a covalent bond, or it may be a polymeric linker many atoms in length. In certain embodiments, the linker is a polypeptide or based on amino acids. In other embodiments, the linker is not peptide-like. In certain embodiments, the linker is a covalent bond (e.g., a carbon-carbon bond, disulfide bond, carbon-heteroatom bond, etc.). In certain embodiments, the linker is a carbon-nitrogen bond of an amide linkage. In certain embodiments, the linker is a cyclic or acyclic, substituted or unsubstituted, branched or unbranched aliphatic or heteroaliphatic linker. In certain embodiments, the linker is polymeric (e.g., polyethylene, polyethylene glycol, polyamide, polyester, etc.). In certain embodiments, the linker comprises a monomer, dimer, or polymer of aminoalkanoic acid. In certain embodiments, the linker comprises an aminoalkanoic acid (e.g., glycine, ethanoic acid, alanine, beta-alanine, 3-aminopropanoic acid, 4-aminobutanoic acid, 5-pentanoic acid, etc.). In certain embodiments, the linker comprises a monomer, dimer, or polymer of aminohexanoic acid (Ahx). In certain embodiments, the linker is based on a carbocyclic moiety (e.g., cyclopentane, cyclohexane). In other embodiments, the linker comprises a polyethylene glycol moiety (PEG). In other embodiments, the linker comprises amino acids. In certain embodiments, the linker comprises a peptide. In certain embodiments, the linker comprises an aryl or heteroaryl moiety. In certain embodiments, the linker is based on a phenyl ring. The linker may include functionalized moieties to facilitate attachment of a nucleophile (e.g., thiol, amino) from the peptide to the linker. Any electrophile may be used as part of the linker. Exemplary electrophiles include, but are not limited to, activated esters, activated amides, Michael acceptors, alkyl halides, aryl halides, acyl halides, and isothiocyanates.

[0721] In some embodiments, the linker is an amino acid or a plurality of amino acids (e.g., a peptide or protein). In some embodiments, the linker is a bond (e.g., a covalent bond), an organic molecule, group, polymer, or chemical moiety. In some embodiments, the linker is about 3 to about 104 (e.g., 5, 6, 7, 8, 9, 10, 11, 12, 13, 14, 15, 16, 17, 18, 19, 20, 21, 22, 23, 24, 25, 26, 27, 28, 29, 30, 31, 32, 33, 34, 35, 36, 37, 38, 39, 40, 41, 42, 43, 44, 45, 46, 47, 48, 49, 50, 55, 60, 65, 70, 75, 80, 85, 90, 95, or 100) amino acids in length.

[0722] In some embodiments, the adenosine deaminase and the napDNAbp are fused via a linker that is 4, 16, 32, or 104 amino acids in length. In some embodiments, the linker is about 3 to about 104 amino acids in length. In some embodiments, any of the fusion proteins provided herein, comprise an adenosine deaminase and a Cas9 domain that are fused to each other via a linker. Various linker lengths and flexibilities between the deaminase domain (e.g., an engineered ecTadA) and the Cas9 domain can be employed (e.g., ranging from very flexible linkers of the form (GGGS)ₙ (SEQ ID NO: 279), (GGGGS)ₙ (SEQ ID NO: 280), and (G)ₙ to more rigid linkers of the form (EAAAK)ₙ (SEQ ID NO: 281), (SGGS)ₙ (SEQ ID NO: 278), SGSETPGTSESATPES (SEQ ID NO: 67) (see, e.g., Guilinger J P, Thompson D B, Liu D R. Fusion of catalytically inactive Cas9 to FokI nuclease improves the specificity of genome modification. Nat. Biotechnol. 2014; 32(6): 577-82; the entire contents are incorporated herein by reference) and (XP)n) in order to achieve the optimal length for activity for the nucleobase editor. In some embodiments, n is 1, 2, 3, 4, 5, 6, 7, 8, 9, 10, 11, 12, 13, 14, or 15. In some embodiments, the linker comprises a (GGS), motif, wherein n is 1, 3, or 7 (SEQ ID NO: 282). In some embodiments, the adenosine deaminase and the Cas9 domain of any of the fusion proteins provided herein are fused via a linker (e.g., an XTEN linker) comprising the amino acid sequence SGSETPGTSESATPES (SEQ ID NO: 67).

Cas9 Complexes with Guide RNAs

[0723] Some aspects of this disclosure provide complexes comprising any of the fusion proteins provided herein, and a guide RNA (e.g., a guide that targets A \ mutation) bound to a CAS9 domain (e.g., a dCas9, a nuclease active Cas9, or a Cas9 nickase) of fusion protein. These complexes are also termed ribonucleoproteins (RNPs). Any method for linking the fusion protein domains can be employed (e.g., ranging from very flexible linkers of the form (GGGS)ₙ (SEQ ID NO: 279), (GGGGS)ₙ (SEQ ID NO: 280), and (G)ₙ to more rigid linkers of the form (EAAAK)ₙ (SEQ ID NO: 281), (SGGS)ₙ (SEQ ID NO: 278), SGSETPGTSESATPES (SEQ ID NO: 67) (see, e.g., Guilinger J P, Thompson D B, Liu D R. Fusion of catalytically inactive Cas9 to FokI nuclease improves the specificity of genome modification. Nat. Biotechnol. 2014; 32(6): 577-82; the entire contents are incorporated herein by reference) and (XP)n) in order to achieve the optimal length for activity for the nucleobase editor. In some embodiments, n is 1, 2, 3, 4, 5, 6, 7, 8, 9, 10, 11, 12, 13, 14, or 15. In some embodiments, the linker comprises a (GGS), motif, wherein n is 1, 3, or 7 (SEQ ID NO: 282). In some embodiments, the Cas9 domain of the fusion proteins provided herein are fused via a linker comprising the amino acid sequence

(SEQ ID NO: 67)
SGSETPGTSESATPES.

[0724] In some embodiments, the guide nucleic acid (e.g., guide RNA) is from 15-100 nucleotides long and comprises a sequence of at least 10 contiguous nucleotides that is complementary to a target sequence. In some embodiments, the guide RNA is 15, 16, 17, 18, 19, 20, 21, 22, 23, 24, 25, 26, 27, 28, 29, 30, 31, 32, 33, 34, 35, 36, 37, 38, 39, 40, 41, 42, 43, 44, 45, 46, 47, 48, 49, or 50 nucleotides long. In some embodiments, the guide RNA comprises a sequence of 15, 16, 17, 18, 19, 20, 21, 22, 23, 24, 25, 26, 27, 28, 29, 30, 31, 32, 33, 34, 35, 36, 37, 38, 39, or 40 contiguous nucleotides that is complementary to a target sequence. In some embodiments, the target sequence is a DNA sequence. In some embodiments, the target sequence is a sequence in the genome of a bacteria, yeast, fungi, insect, plant, or animal. In some embodiments, the target sequence is a sequence in the genome of a human. In some embodiments, the 3′ end of the target sequence is immediately adjacent to a canonical PAM sequence (NGG). In some embodiments, the 3′ end of the target sequence is immediately adjacent to a non-canonical PAM sequence (e.g., a sequence listed in Table 1 or 5′-NAA-3′). In some embodiments, the guide nucleic acid (e.g., guide RNA) is complementary to a sequence in a gene of interest (e.g., a gene associated with a disease or disorder).

[0725] Some aspects of this disclosure provide methods of using the fusion proteins, or complexes provided herein. For example, some aspects of this disclosure provide methods comprising contacting a DNA molecule with any of the fusion proteins provided herein, and with at least one guide RNA, wherein the guide RNA is about 15-100 nucleotides long and comprises a sequence of at least 10 contiguous nucleotides that is complementary to a target sequence. In some embodiments, the 3′ end of the target sequence is immediately adjacent to a canonical PAM sequence (NGG). In some embodiments, the 3′ end of the target sequence is not immediately adjacent to a canonical PAM sequence (NGG). In some embodiments, the 3′ end of the target sequence is immediately adjacent to an AGC, GAG, TTT, GTG, or CAA sequence. In some embodiments, the 3′ end of the target sequence is immediately adjacent to an NGA, NGCG, NGN, NNGRRT, NNNRRT, NGCG, NGCN, NGTN, NGTN, NGTN, or 5′ (TTTV) sequence.

[0726] It will be understood that the numbering of the specific positions or residues in the respective sequences depends on the particular protein and numbering scheme used. Numbering might be different, e.g., in precursors of a mature protein and the mature protein itself, and differences in sequences from species to species may affect numbering. One of skill in the art will be able to identify the respective residue in any homologous protein and in the respective encoding nucleic acid by methods well known in the art, e.g., by sequence alignment and determination of homologous residues.

[0727] It will be apparent to those of skill in the art that in order to target any of the fusion proteins disclosed herein, to a target site, e.g., a site comprising a mutation to be edited, it is typically necessary to co-express the fusion protein together with a guide RNA. As explained in more detail elsewhere herein, a guide RNA typically comprises a tracrRNA framework allowing for Cas9 binding, and a guide sequence, which confers sequence specificity to the Cas9:nucleic acid editing enzyme/domain fusion protein. Alternatively, the guide RNA and tracrRNA may be provided separately, as two nucleic acid molecules. In some embodiments, the guide RNA comprises a structure, wherein the guide sequence comprises a sequence that is complementary to the target sequence. The guide sequence is typically 20 nucleotides long. The sequences of suitable guide RNAs for targeting Cas9:nucleic acid editing enzyme/domain fusion proteins to specific genomic target sites will be apparent to those of skill in the art based on the instant disclosure. Such suitable guide RNA sequences typically comprise guide sequences that are complementary to a nucleic sequence within 50 nucleotides upstream or downstream of the target nucleotide to be edited. Some exemplary guide RNA sequences suitable for targeting any of the provided fusion proteins to specific target sequences are provided herein.

### Methods of Using Fusion Proteins Comprising Adenosine Deaminase Variant and a Cas9 Domain

[0728] Some aspects of this disclosure provide methods of using the fusion proteins, or complexes provided herein. For example, some aspects of this disclosure provide methods comprising contacting a DNA molecule encoding a mutant form of a protein with any of the fusion proteins provided herein, and with at least one guide RNA, wherein the guide RNA is about 15-100 nucleotides long and comprises a sequence of at least 10 contiguous nucleotides that is complementary to a target sequence. In some embodiments, the 3′ end of the target sequence is immediately adjacent to a canonical PAM sequence (NGG). In some embodiments, the 3′ end of the target sequence is not immediately adjacent to a canonical PAM sequence (NGG). In some embodiments, the 3′ end of the target sequence is immediately adjacent to an AGC, GAG, TTT, GTG, or CAA sequence. In some embodiments, the 3′ end of the target sequence is immediately adjacent to an NGA, NGCG, NGN, NNGRRT, NNNRRT, NGCG, NGCN, NGTN, NGTN, NGTN, or 5′ (TTTV) sequence.

[0729] It will be understood that the numbering of the specific positions or residues in the respective sequences depends on the particular protein and numbering scheme used. Numbering might be different, e.g., in precursors of a mature protein and the mature protein itself, and differences in sequences from species to species may affect numbering. One of skill in the art will be able to identify the respective residue in any homologous protein and in the respective encoding nucleic acid by methods well known in the art, e.g., by sequence alignment and determination of homologous residues.

[0730] It will be apparent to those of skill in the art that in order to target any of the fusion proteins comprising a Cas9 domain and an adenosine deaminase variant (e.g., ABE8), as disclosed herein, to a target site, e.g., a site comprising a mutation to be edited, it is typically necessary to co-express the fusion protein together with a guide RNA, e.g., an sgRNA. As explained in more detail elsewhere herein, a guide RNA typically comprises a tracrRNA framework allowing for Cas9 binding, and a guide sequence, which confers sequence specificity to the Cas9:nucleic acid editing enzyme/domain fusion protein. Alternatively, the guide RNA and tracrRNA may be provided separately, as two nucleic acid molecules. In some embodiments, the guide RNA comprises a structure, wherein the guide sequence comprises a sequence that is complementary to the target sequence. The guide sequence is typically 20 nucleotides long. The sequences of suitable guide RNAs for targeting Cas9:nucleic acid editing enzyme/domain fusion proteins to specific genomic target sites will be apparent to those of skill in the art based on the instant disclosure. Such suitable guide RNA sequences typically comprise guide sequences that are complementary to a nucleic sequence within 50 nucleotides upstream or downstream of the target nucleotide to be edited. Some exemplary guide RNA sequences suitable for targeting any of the provided fusion proteins to specific target sequences are provided herein.

Cas12 Complexes with Guide RNAs

[0731] Some aspects of this disclosure provide complexes comprising any of the fusion proteins provided herein, and a guide RNA (e.g., a guide that targets a target polynucleotide for editing).

[0732] In some embodiments, the guide nucleic acid (e.g., guide RNA) is from 15-100 nucleotides long and comprises a sequence of at least 10 contiguous nucleotides that is complementary to a target sequence. In some embodiments, the guide RNA is 15, 16, 17, 18, 19, 20, 21, 22, 23, 24, 25, 26, 27, 28, 29, 30, 31, 32, 33, 34, 35, 36, 37, 38, 39, 40, 41, 42, 43, 44, 45, 46, 47, 48, 49, or 50 nucleotides long. In some embodiments, the guide RNA comprises a sequence of 15, 16, 17, 18, 19, 20, 21, 22, 23, 24, 25, 26, 27, 28, 29, 30, 31, 32, 33, 34, 35, 36, 37, 38, 39, or 40 contiguous nucleotides that is complementary to a target sequence. In some embodiments, the target sequence is a DNA sequence. In some embodiments, the target sequence is a sequence in the genome of a bacteria, yeast, fungi, insect, plant, or animal. In some embodiments, the target sequence is a sequence in the genome of a human. In some embodiments, the 3′ end of the target sequence is immediately adjacent to a canonical PAM sequence. In some embodiments, the 3′ end of the target sequence is immediately adjacent to a non-canonical PAM sequence.

[0733] Some aspects of this disclosure provide methods of using the fusion proteins, or complexes provided herein. For example, some aspects of this disclosure provide methods comprising contacting a DNA molecule with any of the fusion proteins provided herein, and with at least one guide RNA, wherein the guide RNA is about 15-100 nucleotides long and comprises a sequence of at least 10 contiguous nucleotides that is complementary to a target sequence. In some embodiments, the 3′ end of the target sequence is immediately adjacent to an e.g., TTN, DTTN, GTTN, ATTN, ATTC, DTTNT, WTTN, HATY, TTTN, TTTV, TTTC, TG, RTR, or YTN PAM site.

[0734] It will be understood that the numbering of the specific positions or residues in the respective sequences depends on the particular protein and numbering scheme used. Numbering might be different, e.g., in precursors of a mature protein and the mature protein itself, and differences in sequences from species to species may affect numbering. One of skill in the art will be able to identify the respective residue in any homologous protein and in the respective encoding nucleic acid by methods well known in the art, e.g., by sequence alignment and determination of homologous residues.

[0735] It will be apparent to those of skill in the art that in order to target any of the fusion proteins disclosed herein, to a target site, e.g., a site comprising a mutation to be edited, it is typically necessary to co-express the fusion protein together with a guide RNA. As explained in more detail elsewhere herein, a guide RNA typically comprises a tracrRNA framework allowing for Cas12 binding, and a guide sequence, which confers sequence specificity to the Cas12:nucleic acid editing enzyme/domain fusion protein. Alternatively, the guide RNA and tracrRNA may be provided separately, as two nucleic acid molecules. In some embodiments, the guide RNA comprises a structure, wherein the guide sequence comprises a sequence that is complementary to the target sequence. The guide sequence is typically 20 nucleotides long. The sequences of suitable guide RNAs for targeting Cas12:nucleic acid editing enzyme/domain fusion proteins to specific genomic target sites will be apparent to those of skill in the art based on the instant disclosure. Such suitable guide RNA sequences typically comprise guide sequences that are complementary to a nucleic sequence within 50 nucleotides upstream or downstream of the target nucleotide to be edited. Some exemplary guide RNA sequences suitable for targeting any of the provided fusion proteins to specific target sequences are provided herein.

[0736] The domains of the base editor disclosed herein can be arranged in any order as long as the deaminase domain is internalized in the Cas12 protein. Non-limiting examples of a base editor comprising a fusion protein comprising e.g., a Cas12 domain and a deaminase domain can be arranged as following:

NH2-[Cas12 domain]-Linker1-[ABE8]-Linker2-[Cas12 domain]-COOH;
NH2-[Cas12 domain]-Linker1-[ABE8]-[Cas12 domain]-COOH;
NH2-[Cas12 domain]-[ABE8]-Linker2-[Cas12 domain]-COOH;
NH2-[Cas12 domain]-[ABE8]-[Cas12 domain]-COOH;
NH2-[Cas12 domain]-Linker1-[ABE8]-Linker2-[Cas12 domain]-[inosine BER inhibitor]-COOH;
NH2-[Cas12 domain]-Linker1-[ABE8]-[Cas12 domain]-[inosine BER inhibitor]-COOH;
NH2-[Cas12 domain]-[ABE8]-Linker2-[Cas12 domain]-[inosine BER inhibitor]-COOH;
NH2-[Cas12 domain]-[ABE8]-[Cas12 domain]-[inosine BER inhibitor]-COOH;
NH2-[inosine BER inhibitor]-[Cas12 domain]-Linker1-[ABE8]-Linker2-[Cas12 domain]-COOH;
NH2-[inosine BER inhibitor]-[Cas12 domain]-Linker1-[ABE8]-[Cas12 domain]-COOH;
NH2-[inosine BER inhibitor]-[Cas12 domain]-[ABE8]-Linker2-[Cas12 domain]-COOH;
NH2-[inosine BER inhibitor]NH2-[Cas12 domain]-[ABE8]-[Cas12 domain]-COOH;

[0737] Additionally, in some cases, a Gam protein can be fused to an N terminus of a base editor. In some cases, a Gam protein can be fused to a C terminus of a base editor. The Gam protein of bacteriophage Mu can bind to the ends of double strand breaks (DSBs) and protect them from degradation. In some embodiments, using Gam to bind the free ends of DSB can reduce indel formation during the process of base editing. In some embodiments, 174-residue Gam protein is fused to the N terminus of the base editors. See. Komor, A. C., et al., “Improved base excision repair inhibition and bacteriophage Mu Gam protein yields C:G-to-T:A base editors with higher efficiency and product purity” Science Advances 3:eaao4774 (2017). In some cases, a mutation or mutations can change the length of a base editor domain relative to a wild type domain. For example, a deletion of at least one amino acid in at least one domain can reduce the length of the base editor. In another case, a mutation or mutations do not change the length of a domain relative to a wild type domain. For example, substitution(s) in any domain does/do not change the length of the base editor. Non-limiting examples of such base editors, where the length of all the domains is the same as the wild type domains, can include:

NH2-[Cas12 domain]-Linker1-[APOBEC1]-Linker2-[Cas12 domain]-COOH;
NH2-[Cas12 domain]-Linker1-[APOBEC1]-[Cas12 domain]-COOH;
NH2-[Cas12 domain]-[APOBEC1]-Linker2-[Cas12 domain]-COOH;
NH2-[Cas12 domain]-[APOBEC1]-[Cas12 domain]-COOH;
NH2-[Cas12 domain]-Linker1-[APOBEC1]-Linker2-[Cas12 domain][UGI]-COOH;
NH2-[Cas12 domain]-Linker1-[APOBEC1]-[Cas12 domain]-[UGI]-COOH;
NH2-[Cas12 domain]-[APOBEC1]-Linker2-[Cas12 domain][UGI]-COOH;
NH2-[Cas12 domain]-[APOBEC1]-[Cas12 domain][UGI]-COOH;
NH2-[UGI]-[Cas12 domain]-Linker1-[APOBEC1]-Linker2-[Cas12 domain]-COOH;
NH2-[UGI]-[Cas12 domain]-Linker1-[APOBEC1]-[Cas12 domain]-COOH;
NH2-[UGI]-[Cas12 domain]-[APOBEC1]-Linker2-[Cas12 domain]-COOH;
NH2-[UGI]-[Cas12 domain]-[APOBEC1]-[Cas12 domain]-COOH; In some embodiments, the base editing fusion proteins provided herein need to be positioned at a precise location, for example, where a target base is placed within a defined region (e.g., a “deamination window”). In some cases, a target can be within a 4-base region. In some cases, such a defined target region can be approximately 15 bases upstream of the PAM. See Komor, A. C., et al., “Programmable editing of a target base in genomic DNA without double-stranded DNA cleavage” Nature 533, 420-424 (2016); Gaudelli, N. M., et al., “Programmable base editing of A•T to G•C in genomic DNA without DNA cleavage” Nature 551, 464-471 (2017); and Komor, A. C., et al., “Improved base excision repair inhibition and bacteriophage Mu Gam protein yields C:G-to-T:A base editors with higher efficiency and product purity” Science Advances 3:eaao4774 (2017), the entire contents of which are hereby incorporated by reference.

[0738] A defined target region can be a deamination window. A deamination window can be the defined region in which a base editor acts upon and deaminates a target nucleotide. In some embodiments, the deamination window is within a 2, 3, 4, 5, 6, 7, 8, 9, or 10 base regions. In some embodiments, the deamination window is 5, 6, 7, 8, 9, 10, 11, 12, 13, 14, 15, 16, 17, 18, 19, 20, 21, 22, 23, 24, or 25 bases upstream of the PAM.

[0739] The base editors of the present disclosure can comprise any domain, feature or amino acid sequence which facilitates the editing of a target polynucleotide sequence. For example, in some embodiments, the base editor comprises a nuclear localization sequence (NLS). In some embodiments, an NLS of the base editor is localized between a deaminase domain and a napDNAbp domain. In some embodiments, an NLS of the base editor is localized C-terminal to a napDNAbp domain.

[0740] Protein domains included in the fusion protein can be a heterologous functional domain. Non-limiting examples of protein domains which can be included in the fusion protein include a deaminase domain (e.g., cytidine deaminase and/or adenosine deaminase), a uracil glycosylase inhibitor (UGI) domain, epitope tags, and reporter gene sequences. Protein domains can be a heterologous functional domain, for example, having one or more of the following activities: transcriptional activation activity, transcriptional repression activity, transcription release factor activity, gene silencing activity, chromatin modifying activity, epigenetic modifying activity, histone modification activity, RNA cleavage activity, and nucleic acid binding activity. Such heterologous functional domains can confer a function activity, such as modification of a target polypeptide associated with target DNA (e.g., a histone, a DNA binding protein, etc.), leading to, for example, histone methylation, histone acetylation, histone ubiquitination, and the like. Other functions and/or activities conferred can include transposase activity, integrase activity, recombinase activity, ligase activity, ubiquitin ligase activity, deubiquitinating activity, adenylation activity, deadenylation activity, SUMOylation activity, deSUMOylation activity, or any combination of the above.

[0741] A domain may be detected or labeled with an epitope tag, a reporter protein, other binding domains. Non-limiting examples of epitope tags include histidine (His) tags, V5 tags, FLAG tags, influenza hemagglutinin (HA) tags, Myc tags, VSV-G tags, and thioredoxin (Trx) tags. Examples of reporter genes include, but are not limited to, glutathione transferase (GST), horseradish peroxidase (HRP), chloramphenicol acetyltransferase (CAT) beta-galactosidase, beta-glucuronidase, luciferase, green fluorescent protein (GFP), HcRed, DsRed, cyan fluorescent protein (CFP), yellow fluorescent protein (YFP), and autofluorescent proteins including blue fluorescent protein (BFP). Additional protein sequences can include amino acid sequences that bind DNA molecules or bind other cellular molecules, including but not limited to maltose binding protein (MBP), S-tag, Lex A DNA binding domain (DBD) fusions, GAL4 DNA binding domain fusions, and herpes simplex virus (HSV) BP16 protein fusions.

[0742] In some embodiments, BhCas12b guide polynucleotide has the following sequence:

BhCas12b sgRNA scaffold (underlined) + 20 nt to
23 nt guide sequence (denoted by Nn)
(SEQ ID NO: 142)
5′GTTCTGTCTTTTGGTCAGGACAACCGTCTAGCTATAAGTGCTGCAGG
GTGTGAGAAACTCCTATTGCTGGACGATGTCTCTTACGAGGCATTAGCA
CNNNNNNNNNNNNNNNNNNNN-3′

[0743] In some embodiments, BvCas12b and AaCas12b guide polynucleotides have the following sequences:

BvCas12b sgRNA scaffold (underlined) + 20 nt to
23 nt guide sequence (denoted by Nn)
(SEQ ID NO: 143)
5′GACCTATAGGGTCAATGAATCTGTGCGTGTGCCATAAGTAATTAAAA
ATTACCCACCACAGGAGCACCTGAAAACAGGTGCTTGGCACNNNNNNNN
NNNNNNNNNNNN-3′

AaCas12b sgRNA scaffold (underlined) + 20 nt to
23 nt guide sequence (denoted by Nn)
(SEQ ID NO: 144)
5′GTCTAAAGGACAGAATTTTTCAACGGGTGTGCCAATGGCCACTTTCC
AGGTGGCAAAGCCCGTTGAACTTCTCAAAAAGAACGATCTGAGAAGTGG
CACNNNNNNNNNNNNNNNNNNNN-3′

### Base Editor Efficiency

[0744] CRISPR-Cas9 nucleases have been widely used to mediate targeted genome editing. In most genome editing applications, Cas9 forms a complex with a guide polynucleotide (e.g., single guide RNA (sgRNA)) and induces a double-stranded DNA break (DSB) at the target site specified by the sgRNA sequence. Cells primarily respond to this DSB through the non-homologous end-joining (NHEJ) repair pathway, which results in stochastic insertions or deletions (indels) that can cause frameshift mutations that disrupt the gene. In the presence of a donor DNA template with a high degree of homology to the sequences flanking the DSB, gene correction can be achieved through an alternative pathway known as homology directed repair (HDR). Unfortunately, under most non-perturbative conditions, HDR is inefficient, dependent on cell state and cell type, and dominated by a larger frequency of indels. As most of the known genetic variations associated with human disease are point mutations, methods that can more efficiently and cleanly make precise point mutations are needed. Base editing systems as provided herein provide a new way to provide genome editing without generating double-strand DNA breaks, without requiring a donor DNA template, and without inducing an excess of stochastic insertions and deletions.

[0745] The fusion proteins of the invention advantageously modify a specific nucleotide base encoding a protein comprising a mutation without generating a significant proportion of indels. An “indel,” as used herein, refers to the insertion or deletion of a nucleotide base within a nucleic acid. Such insertions or deletions can lead to frame shift mutations within a coding region of a gene. In some embodiments, it is desirable to generate base editors that efficiently modify (e.g., mutate or deaminate) a specific nucleotide within a nucleic acid, without generating a large number of insertions or deletions (i.e., indels) in the nucleic acid. In certain embodiments, any of the base editors provided herein are capable of generating a greater proportion of intended modifications (e.g., mutations or deaminations) versus indels.

[0746] In some embodiments, any of base editor systems provided herein result in less than 50%, less than 40%, less than 30%, less than 20%, less than 19%, less than 18%, less than 17%, less than 16%, less than 15%, less than 14%, less than 13%, less than 12%, less than 11%, less than 10%, less than 9%, less than 8%, less than 7%, less than 6%, less than 5%, less than 4%, less than 3%, less than 2%, less than 1%, less than 0.9%, less than 0.8%, less than 0.7%, less than 0.6%, less than 0.5%, less than 0.4%, less than 0.3%, less than 0.2%, less than 0.1%, less than 0.09%, less than 0.08%, less than 0.07%, less than 0.06%, less than 0.05%, less than 0.04%, less than 0.03%, less than 0.02%, or less than 0.01% indel formation in the target polynucleotide sequence.

[0747] In some embodiments, any of base editor systems comprising one of the ABE8 base editor variants described herein result in less than 50%, less than 40%, less than 30%, less than 20%, less than 19%, less than 18%, less than 17%, less than 16%, less than 15%, less than 14%, less than 13%, less than 12%, less than 11%, less than 10%, less than 9%, less than 8%, less than 7%, less than 6%, less than 5%, less than 4%, less than 3%, less than 2%, less than 1%, less than 0.9%, less than 0.8%, less than 0.7%, less than 0.6%, less than 0.5%, less than 0.4%, less than 0.3%, less than 0.2%, less than 0.1%, less than 0.09%, less than 0.08%, less than 0.07%, less than 0.06%, less than 0.05%, less than 0.04%, less than 0.03%, less than 0.02%, or less than 0.01% indel formation in the target polynucleotide sequence. In some embodiments, any of base editor systems comprising one of the ABE8 base editor variants described herein result in less than 0.8% indel formation in the target polynucleotide sequence. In some embodiments, any of base editor systems comprising one of the ABE8 base editor variants described herein result in at most 0.8% indel formation in the target polynucleotide sequence. In some embodiments, any of base editor systems comprising one of the ABE8 base editor variants described herein result in less than 0.3% indel formation in the target polynucleotide sequence. In some embodiments, any of base editor systems comprising one of the ABE8 base editor variants described results in lower indel formation in the target polynucleotide sequence compared to a base editor system comprising one of ABE7 base editors. In some embodiments, any of base editor systems comprising one of the ABE8 base editor variants described herein results in lower indel formation in the target polynucleotide sequence compared to a base editor system comprising an ABE7.10.

[0748] In some embodiments, any of base editor systems comprising one of the ABE8 base editor variants described herein has reduction in indel frequency compared to a base editor system comprising one of the ABE7 base editors. In some embodiments, any of base editor systems comprising one of the ABE8 base editor variants described herein has at least 0.01%, at least 1%, at least 2%, at least 3%, at least 4%, at least 5%, at least 10%, at least 15%, at least 20%, at least 25%, at least 30%, at least 35%, at least 40%, at least 45%, at least 50%, at least 55%, at least 60%, at least 65%, at least 70%, at least 75%, at least 80%, at least 85%, at least 90%, or at least 95% reduction in indel frequency compared to a base editor system comprising one of the ABE7 base editors. In some embodiments, a base editor system comprising one of the ABE8 base editor variants described herein has at least 0.01%, at least 1%, at least 2%, at least 3%, at least 4%, at least 5%, at least 10%, at least 15%, at least 20%, at least 25%, at least 30%, at least 35%, at least 40%, at least 45%, at least 50%, at least 55%, at least 60%, at least 65%, at least 70%, at least 75%, at least 80%, at least 85%, at least 90%, or at least 95% reduction in indel frequency compared to a base editor system comprising an ABE7.10.

[0749] The invention provides adenosine deaminase variants (e.g., ABE8 variants) that have increased efficiency and specificity. In particular, the adenosine deaminase variants described herein are more likely to edit a desired base within a polynucleotide, and are less likely to edit bases that are not intended to be altered in the base editing window (e.g., “bystanders”).

[0750] In some embodiments, any of the base editing system comprising one of the ABE8 base editor variants described herein has reduced bystander editing or mutations. In some embodiments, an unintended editing or mutation is a bystander mutation or bystander editing, for example, base editing of a target base (e.g., A or C) in an unintended or non-target position in a target window of a target nucleotide sequence. In some embodiments, any of the base editing system comprising one of the ABE8 base editor variants described herein has reduced bystander editing or mutations compared to a base editor system comprising an ABE7 base editor, e.g., ABE7.10. In some embodiments, any of the base editing system comprising one of the ABE8 base editor variants described herein has reduced bystander editing or mutations by at least 1%, at least 2%, at least 3%, at least 4%, at least 5%, at least 10%, at least 15%, at least 20%, at least 25%, at least 30%, at least 35%, at least 40%, at least 45%, at least 50%, at least 55%, at least 60%, at least 65%, at least 70%, at least 75%, at least 80%, at least 85%, at least 90%, at least 95%, or at least 99% compared to a base editor system comprising an ABE7 base editor, e.g., ABE7.10. In some embodiments, any of the base editing system comprising one of the ABE8 base editor variants described herein has reduced bystander editing or mutations by at least 1.1 fold, at least 1.2 fold, at least 1.3 fold, at least 1.4 fold, at least 1.5 fold, at least 1.6 fold, at least 1.7 fold, at least 1.8 fold, at least 1.9 fold, at least 2.0 fold, at least 2.1 fold, at least 2.2 fold, at least 2.3 fold, at least 2.4 fold, at least 2.5 fold, at least 2.6 fold, at least 2.7 fold, at least 2.8 fold, at least 2.9 fold, or at least 3.0 fold compared to a base editor system comprising an ABE7 base editor, e.g., ABE7.10.

[0751] In some embodiments, any of the base editing system comprising one of the ABE8 base editor variants described herein has reduced spurious editing. In some embodiments, an unintended editing or mutation is a spurious mutation or spurious editing, for example, non-specific editing or guide independent editing of a target base (e.g., A or C) in an unintended or non-target region of the genome. In some embodiments, any of the base editing system comprising one of the ABE8 base editor variants described herein has reduced spurious editing compared to a base editor system comprising an ABE7 base editor, e.g., ABE7.10. In some embodiments, any of the base editing system comprising one of the ABE8 base editor variants described herein has reduced spurious editing by at least 1%, at least 2%, at least 3%, at least 4%, at least 5%, at least 10%, at least 15%, at least 20%, at least 25%, at least 30%, at least 35%, at least 40%, at least 45%, at least 50%, at least 55%, at least 60%, at least 65%, at least 70%, at least 75%, at least 80%, at least 85%, at least 90%, at least 95%, or at least 99% compared to a base editor system comprising an ABE7 base editor, e.g., ABE7.10. In some embodiments, any of the base editing system comprising one of the ABE8 base editor variants described herein has reduced spurious editing by at least 1.1 fold, at least 1.2 fold, at least 1.3 fold, at least 1.4 fold, at least 1.5 fold, at least 1.6 fold, at least 1.7 fold, at least 1.8 fold, at least 1.9 fold, at least 2.0 fold, at least 2.1 fold, at least 2.2 fold, at least 2.3 fold, at least 2.4 fold, at least 2.5 fold, at least 2.6 fold, at least 2.7 fold, at least 2.8 fold, at least 2.9 fold, or at least 3.0 fold compared to a base editor system comprising an ABE7 base editor, e.g., ABE7.10.

[0752] Some aspects of the disclosure are based on the recognition that any of the base editors provided herein are capable of efficiently generating an intended mutation, such as a point mutation, in a nucleic acid (e.g., a nucleic acid within a genome of a subject) without generating a significant number of unintended mutations, such as unintended point mutations (i.e., mutation of bystanders). In some embodiments, any of the base editors provided herein are capable of generating at least 0.01% of intended mutations (i.e., at least 0.01% base editing efficiency). In some embodiments, any of the base editors provided herein are capable of generating at least 0.01%, 1%, 2%, 3%, 4%, 5%, 10%, 15%, 20%, 25%, 30%, 40%, 45%, 50%, 60%, 70%, 80%, 90%, 95%, or 99% of intended mutations.

[0753] In some embodiments, any of the ABE8 base editor variants described herein have at least 0.01%, at least 1%, at least 2%, at least 3%, at least 4%, at least 5%, at least 10%, at least 15%, at least 20%, at least 25%, at least 30%, at least 35%, at least 40%, at least 45%, at least 50%, at least 55%, at least 60%, at least 65%, at least 70%, at least 75%, at least 80%, at least 85%, at least 90%, at least 95%, or at least 99% base editing efficiency. In some embodiments, the base editing efficiency may be measured by calculating the percentage of edited nucleobases in a population of cells. In some embodiments, any of the ABE8 base editor variants described herein have base editing efficiency of at least 0.01%, at least 1%, at least 2%, at least 3%, at least 4%, at least 5%, at least 10%, at least 15%, at least 20%, at least 25%, at least 30%, at least 35%, at least 40%, at least 45%, at least 50%, at least 55%, at least 60%, at least 65%, at least 70%, at least 75%, at least 80%, at least 85%, at least 90%, at least 95%, or at least 99% as measured by edited nucleobases in a population of cells.

[0754] In some embodiments, any of the ABE8 base editor variants described herein has higher base editing efficiency compared to the ABE7 base editors. In some embodiments, any of the ABE8 base editor variants described herein have at least 1%, at least 2%, at least 3%, at least 4%, at least 5%, at least 10%, at least 15%, at least 20%, at least 25%, at least 30%, at least 35%, at least 40%, at least 45%, at least 50%, at least 55%, at least 60%, at least 65%, at least 70%, at least 75%, at least 80%, at least 85%, at least 90%, at least 95%, at least 99%, at least 100%, at least 105%, at least 110%, at least 115%, at least 120%, at least 125%, at least 130%, at least 135%, at least 140%, at least 145%, at least 150%, at least 155%, at least 160%, at least 165%, at least 170%, at least 175%, at least 180%, at least 185%, at least 190%, at least 195%, at least 200%, at least 210%, at least 220%, at least 230%, at least 240%, at least 250%, at least 260%, at least 270%, at least 280%, at least 290%, at least 300%, at least 310%, at least 320%, at least 330%, at least 340%, at least 350%, at least 360%, at least 370%, at least 380%, at least 390%, at least 400%, at least 450%, or at least 500% higher base editing efficiency compared to an ABE7 base editor, e.g., ABE7.10.

[0755] In some embodiments, any of the ABE8 base editor variants described herein has at least 1.1 fold, at least 1.2 fold, at least 1.3 fold, at least 1.4 fold, at least 1.5 fold, at least 1.6 fold, at least 1.7 fold, at least 1.8 fold, at least 1.9 fold, at least 2.0 fold, at least 2.1 fold, at least 2.2 fold, at least 2.3 fold, at least 2.4 fold, at least 2.5 fold, at least 2.6 fold, at least 2.7 fold, at least 2.8 fold, at least 2.9 fold, at least 3.0 fold, at least 3.1 fold, at least 3.2, at least 3.3 fold, at least 3.4 fold, at least 3.5 fold, at least 3.6 fold, at least 3.7 fold, at least 3.8 fold, at least 3.9 fold, at least 4.0 fold, at least 4.1 fold, at least 4.2 fold, at least 4.3 fold, at least 4.4 fold, at least 4.5 fold, at least 4.6 fold, at least 4.7 fold, at least 4.8 fold, at least 4.9 fold, or at least 5.0 fold higher base editing efficiency compared to an ABE7 base editor, e.g., ABE7.10.

[0756] In some embodiments, any of the ABE8 base editor variants described herein have at least 0.01%, at least 1%, at least 2%, at least 3%, at least 4%, at least 5%, at least 10%, at least 15%, at least 20%, at least 25%, at least 30%, at least 35%, at least 40%, at least 45%, at least 50%, at least 55%, at least 60%, at least 65%, at least 70%, at least 75%, at least 80%, at least 85%, at least 90%, at least 95%, or at least 99% on-target base editing efficiency. In some embodiments, any of the ABE8 base editor variants described herein have on-target base editing efficiency of at least 0.01%, at least 1%, at least 2%, at least 3%, at least 4%, at least 5%, at least 10%, at least 15%, at least 20%, at least 25%, at least 30%, at least 35%, at least 40%, at least 45%, at least 50%, at least 55%, at least 60%, at least 65%, at least 70%, at least 75%, at least 80%, at least 85%, at least 90%, at least 95%, or at least 99% as measured by edited target nucleobases in a population of cells.

[0757] In some embodiments, any of the ABE8 base editor variants described herein has higher on-target base editing efficiency compared to the ABE7 base editors. In some embodiments, any of the ABE8 base editor variants described herein have at least 1%, at least 2%, at least 3%, at least 4%, at least 5%, at least 10%, at least 15%, at least 20%, at least 25%, at least 30%, at least 35%, at least 40%, at least 45%, at least 50%, at least 55%, at least 60%, at least 65%, at least 70%, at least 75%, at least 80%, at least 85%, at least 90%, at least 95%, at least 99%, at least 100%, at least 105%, at least 110%, at least 115%, at least 120%, at least 125%, at least 130%, at least 135%, at least 140%, at least 145%, at least 150%, at least 155%, at least 160%, at least 165%, at least 170%, at least 175%, at least 180%, at least 185%, at least 190%, at least 195%, at least 200%, at least 210%, at least 220%, at least 230%, at least 240%, at least 250%, at least 260%, at least 270%, at least 280%, at least 290%, at least 300%, at least 310%, at least 320%, at least 330%, at least 340%, at least 350%, at least 360%, at least 370%, at least 380%, at least 390%, at least 400%, at least 450%, or at least 500% higher on-target base editing efficiency compared to an ABE7 base editor, e.g., ABE7.10.

[0758] In some embodiments, any of the ABE8 base editor variants described herein has at least 1.1 fold, at least 1.2 fold, at least 1.3 fold, at least 1.4 fold, at least 1.5 fold, at least 1.6 fold, at least 1.7 fold, at least 1.8 fold, at least 1.9 fold, at least 2.0 fold, at least 2.1 fold, at least 2.2 fold, at least 2.3 fold, at least 2.4 fold, at least 2.5 fold, at least 2.6 fold, at least 2.7 fold, at least 2.8 fold, at least 2.9 fold, at least 3.0 fold, at least 3.1 fold, at least 3.2 fold, at least 3.3 fold, at least 3.4 fold, at least 3.5 fold, at least 3.6 fold, at least 3.7 fold, at least 3.8 fold, at least 3.9 fold, at least 4.0 fold, at least 4.1 fold, at least 4.2 fold, at least 4.3 fold, at least 4.4 fold, at least 4.5 fold, at least 4.6 fold, at least 4.7 fold, at least 4.8 fold, at least 4.9 fold, or at least 5.0 fold higher on-target base editing efficiency compared to an ABE7 base editor, e.g., ABE7.10.

[0759] The ABE8 base editor variants described herein may be delivered to a host cell via a plasmid, a vector, a LNP complex, or an mRNA. In some embodiments, any of the ABE8 base editor variants described herein is delivered to a host cell as an mRNA. In some embodiments, an ABE8 base editor delivered via a nucleic acid based delivery system, e.g., an mRNA, has on-target editing efficiency of at least at least 1%, at least 2%, at least 3%, at least 4%, at least 5%, at least 10%, at least 15%, at least 20%, at least 25%, at least 30%, at least 35%, at least 40%, at least 45%, at least 50%, at least 55%, at least 60%, at least 65%, at least 70%, at least 75%, at least 80%, at least 85%, at least 90%, at least 95%, or at least 99% as measured by edited nucleobases. In some embodiments, an ABE8 base editor delivered by an mRNA system has higher base editing efficiency compared to an ABE8 base editor delivered by a plasmid or vector system. In some embodiments, any of the ABE8 base editor variants described herein has at least 1%, at least 2%, at least 3%, at least 4%, at least 5%, at least 10%, at least 15%, at least 20%, at least 25%, at least 30%, at least 35%, at least 40%, at least 45%, at least 50%, at least 55%, at least 60%, at least 65%, at least 70%, at least 75%, at least 80%, at least 85%, at least 90%, at least 95%, at least 99%, at least 100%, at least 105%, at least 110%, at least 115%, at least 120%, at least 125%, at least 130%, at least 135%, at least 140%, at least 145%, at least 150%, at least 155%, at least 160%, at least 165%, at least 170%, at least 175%, at least 180%, at least 185%, at least 190%, at least 195%, at least 200%, at least 210%, at least 220%, at least 230%, at least 240%, at least 250%, at least 260%, at least 270%, at least 280%, at least 290%, at least 300% higher, at least 310%, at least 320%, at least 330%, at least 340%, at least 350%, at least 360%, at least 370%, at least 380%, at least 390%, at least 400%, at least 450%, or at least 500% on-target editing efficiency when delivered by an mRNA system compared to when delivered by a plasmid or vector system. In some embodiments, any of the ABE8 base editor variants described herein has at least 1.1 fold, at least 1.2 fold, at least 1.3 fold, at least 1.4 fold, at least 1.5 fold, at least 1.6 fold, at least 1.7 fold, at least 1.8 fold, at least 1.9 fold, at least 2.0 fold, at least 2.1 fold, at least 2.2 fold, at least 2.3 fold, at least 2.4 fold, at least 2.5 fold, at least 2.6 fold, at least 2.7 fold, at least 2.8 fold, at least 2.9 fold, at least 3.0 fold, at least 3.1 fold, at least 3.2 fold, at least 3.3 fold, at least 3.4 fold, at least 3.5 fold, at least 3.6 fold, at least 3.7 fold, at least 3.8 fold, at least 3.9 fold, at least 4.0 fold, at least 4.1 fold, at least 4.2 fold, at least 4.3 fold, at least 4.4 fold, at least 4.5 fold, at least 4.6 fold, at least 4.7 fold, at least 4.8 fold, at least 4.9 fold, or at least 5.0 fold higher on-target editing efficiency when delivered by an mRNA system compared to when delivered by a plasmid or vector system.

[0760] In some embodiments, any of base editor systems comprising one of the ABE8 base editor variants described herein result in less than 50%, less than 40%, less than 30%, less than 20%, less than 19%, less than 18%, less than 17%, less than 16%, less than 15%, less than 14%, less than 13%, less than 12%, less than 11%, less than 10%, less than 9%, less than 8%, less than 7%, less than 6%, less than 5%, less than 4%, less than 3%, less than 2%, less than 1%, less than 0.9%, less than 0.8%, less than 0.7%, less than 0.6%, less than 0.5%, less than 0.4%, less than 0.3%, less than 0.2%, less than 0.1%, less than 0.09%, less than 0.08%, less than 0.07%, less than 0.06%, less than 0.05%, less than 0.04%, less than 0.03%, less than 0.02%, or less than 0.01% off-target editing in the target polynucleotide sequence.

[0761] In some embodiments, any of the ABE8 base editor variants described herein has lower guided off-target editing efficiency when delivered by an mRNA system compared to when delivered by a plasmid or vector system. In some embodiments, any of the ABE8 base editor variants described herein has at least 1%, at least 2%, at least 3%, at least 4%, at least 5%, at least 10%, at least 15%, at least 20%, at least 25%, at least 30%, at least 35%, at least 40%, at least 45%, at least 50%, at least 55%, at least 60%, at least 65%, at least 70%, at least 75%, at least 80%, at least 85%, at least 90%, at least 95%, or at least 99% lower guided off-target editing efficiency when delivered by an mRNA system compared to when delivered by a plasmid or vector system. In some embodiments, any of the ABE8 base editor variants described herein has at least 1.1 fold, at least 1.2 fold, at least 1.3 fold, at least 1.4 fold, at least 1.5 fold, at least 1.6 fold, at least 1.7 fold, at least 1.8 fold, at least 1.9 fold, at least 2.0 fold, at least 2.1 fold, at least 2.2 fold, at least 2.3 fold, at least 2.4 fold, at least 2.5 fold, at least 2.6 fold, at least 2.7 fold, at least 2.8 fold, at least 2.9 fold, or at least 3.0 fold lower guided off-target editing efficiency when delivered by an mRNA system compared to when delivered by a plasmid or vector system. In some embodiments, any of the ABE8 base editor variants described herein has at least about 2.2 fold decrease in guided off-target editing efficiency when delivered by an mRNA system compared to when delivered by a plasmid or vector system.

[0762] In some embodiments, any of the ABE8 base editor variants described herein has lower guide-independent off-target editing efficiency when delivered by an mRNA system compared to when delivered by a plasmid or vector system. In some embodiments, any of the ABE8 base editor variants described herein has at least 1%, at least 2%, at least 3%, at least 4%, at least 5%, at least 10%, at least 15%, at least 20%, at least 25%, at least 30%, at least 35%, at least 40%, at least 45%, at least 50%, at least 55%, at least 60%, at least 65%, at least 70%, at least 75%, at least 80%, at least 85%, at least 90%, at least 95%, or at least 99% lower guide-independent off-target editing efficiency when delivered by an mRNA system compared to when delivered by a plasmid or vector system. In some embodiments, any of the ABE8 base editor variants described herein has at least 1.1 fold, at least 1.2 fold, at least 1.3 fold, at least 1.4 fold, at least 1.5 fold, at least 1.6 fold, at least 1.7 fold, at least 1.8 fold, at least 1.9 fold, at least 2.0 fold, at least 2.1 fold, at least 2.2 fold, at least 2.3 fold, at least 2.4 fold, at least 2.5 fold, at least 2.6 fold, at least 2.7 fold, at least 2.8 fold, at least 2.9 fold, at least 3.0 fold, at least 5.0 fold, at least 10.0 fold, at least 20.0 fold, at least 50.0 fold, at least 70.0 fold, at least 100.0 fold, at least 120.0 fold, at least 130.0 fold, or at least 150.0 fold lower guide-independent off-target editing efficiency when delivered by an mRNA system compared to when delivered by a plasmid or vector system. In some embodiments, ABE8 base editor variants described herein has 134.0 fold decrease in guide-independent off-target editing efficiency (e.g., spurious RNA deamination) when delivered by an mRNA system compared to when delivered by a plasmid or vector system. In some embodiments, ABE8 base editor variants described herein does not increase guide-independent mutation rates across the genome.

[0763] In some embodiments, the base editors provided herein are capable of generating a ratio of intended mutations to indels that is greater than 1:1. In some embodiments, the base editors provided herein are capable of generating a ratio of intended mutations to indels that is at least 1.5:1, at least 2:1, at least 2.5:1, at least 3:1, at least 3.5:1, at least 4:1, at least 4.5:1, at least 5:1, at least 5.5:1, at least 6:1, at least 6.5:1, at least 7:1, at least 7.5:1, at least 8:1, at least 10:1, at least 12:1, at least 15:1, at least 20:1, at least 25:1, at least 30:1, at least 40:1, at least 50:1, at least 100:1, at least 200:1, at least 300:1, at least 400:1, at least 500:1, at least 600:1, at least 700:1, at least 800:1, at least 900:1, or at least 1000:1, or more.

[0764] The number of intended mutations and indels can be determined using any suitable method, for example, as described in International PCT Application Nos. PCT/2017/045381 (WO2018/027078) and PCT/US2016/058344 (WO2017/070632); Komor, A. C., et al., “Programmable editing of a target base in genomic DNA without double-stranded DNA cleavage” Nature 533, 420-424 (2016); Gaudelli, N. M., et al., “Programmable base editing of A•T to G•C in genomic DNA without DNA cleavage” Nature 551, 464-471 (2017); and Komor, A. C., et al., “Improved base excision repair inhibition and bacteriophage Mu Gam protein yields C:G-to-T:A base editors with higher efficiency and product purity” Science Advances 3:eaao4774 (2017); the entire contents of which are hereby incorporated by reference.

[0765] In some embodiments, to calculate indel frequencies, sequencing reads are scanned for exact matches to two 10-bp sequences that flank both sides of a window in which indels can occur. If no exact matches are located, the read is excluded from analysis. If the length of this indel window exactly matches the reference sequence the read is classified as not containing an indel. If the indel window is two or more bases longer or shorter than the reference sequence, then the sequencing read is classified as an insertion or deletion, respectively. In some embodiments, the base editors provided herein can limit formation of indels in a region of a nucleic acid. In some embodiments, the region is at a nucleotide targeted by a base editor or a region within 2, 3, 4, 5, 6, 7, 8, 9, or 10 nucleotides of a nucleotide targeted by a base editor.

[0766] The number of indels formed at a target nucleotide region can depend on the amount of time a nucleic acid (e.g., a nucleic acid within the genome of a cell) is exposed to a base editor. In some embodiments, the number or proportion of indels is determined after at least 1 hour, at least 2 hours, at least 6 hours, at least 12 hours, at least 24 hours, at least 36 hours, at least 48 hours, at least 3 days, at least 4 days, at least 5 days, at least 7 days, at least 10 days, or at least 14 days of exposing the target nucleotide sequence (e.g., a nucleic acid within the genome of a cell) to a base editor. It should be appreciated that the characteristics of the base editors as described herein can be applied to any of the fusion proteins, or methods of using the fusion proteins provided herein.

[0767] In some embodiments, the base editors provided herein are capable of limiting formation of indels in a region of a nucleic acid. In some embodiments, the region is at a nucleotide targeted by a base editor or a region within 2, 3, 4, 5, 6, 7, 8, 9, or 10 nucleotides of a nucleotide targeted by a base editor. In some embodiments, any of the base editors provided herein are capable of limiting the formation of indels at a region of a nucleic acid to less than 1%, less than 1.5%, less than 2%, less than 2.5%, less than 3%, less than 3.5%, less than 4%, less than 4.5%, less than 5%, less than 6%, less than 7%, less than 8%, less than 9%, less than 10%, less than 12%, less than 15%, or less than 20%. The number of indels formed at a nucleic acid region may depend on the amount of time a nucleic acid (e.g., a nucleic acid within the genome of a cell) is exposed to a base editor. In some embodiments, any number or proportion of indels is determined after at least 1 hour, at least 2 hours, at least 6 hours, at least 12 hours, at least 24 hours, at least 36 hours, at least 48 hours, at least 3 days, at least 4 days, at least 5 days, at least 7 days, at least 10 days, or at least 14 days of exposing a nucleic acid (e.g., a nucleic acid within the genome of a cell) to a base editor.

[0768] Some aspects of the disclosure are based on the recognition that any of the base editors provided herein are capable of efficiently generating an intended mutation in a nucleic acid (e.g., a nucleic acid within a genome of a subject) without generating a significant number of unintended mutations (e.g., spurious off-target editing or bystander editing). In some embodiments, an intended mutation is a mutation that is generated by a specific base editor bound to a gRNA, specifically designed to alter or correct a mutation in a target gene. In some embodiments, an intended mutation is a mutation that is generated by a specific base editor bound to a gRNA, specifically designed to alter or correct an HBG mutation. In some embodiments, any of the base editors provided herein are capable of generating a ratio of intended mutations to unintended mutations (e.g., intended mutations:unintended mutations) that is greater than 1:1. In some embodiments, any of the base editors provided herein are capable of generating a ratio of intended mutations to unintended mutations that is at least 1.5:1, at least 2:1, at least 2.5:1, at least 3:1, at least 3.5:1, at least 4:1, at least 4.5:1, at least 5:1, at least 5.5:1, at least 6:1, at least 6.5:1, at least 7:1, at least 7.5:1, at least 8:1, at least 10:1, at least 12:1, at least 15:1, at least 20:1, at least 25:1, at least 30:1, at least 40:1, at least 50:1, at least 100:1, at least 150:1, at least 200:1, at least 250:1, at least 500:1, or at least 1000:1, or more. It should be appreciated that the characteristics of the base editors described herein may be applied to any of the fusion proteins, or methods of using the fusion proteins provided herein.

### Multiplex Editing

[0769] In some embodiments, the base editor system provided herein is capable of multiplex editing of a plurality of nucleobase pairs in one or more genes. In some embodiments, the plurality of nucleobase pairs is located in the same gene. In some embodiments, the plurality of nucleobase pairs is located in one or more gene, wherein at least one gene is located in a different locus. In some embodiments, the multiplex editing can comprise one or more guide polynucleotides. In some embodiments, the multiplex editing can comprise one or more base editor system. In some embodiments, the multiplex editing can comprise one or more base editor systems with a single guide polynucleotide. In some embodiments, the multiplex editing can comprise one or more base editor system with a plurality of guide polynucleotides. In some embodiments, the multiplex editing can comprise one or more guide polynucleotide with a single base editor system. In some embodiments, the multiplex editing can comprise at least one guide polynucleotide that does not require a PAM sequence to target binding to a target polynucleotide sequence. In some embodiments, the multiplex editing can comprise at least one guide polynucleotide that requires a PAM sequence to target binding to a target polynucleotide sequence. In some embodiments, the multiplex editing can comprise a mix of at least one guide polynucleotide that does not require a PAM sequence to target binding to a target polynucleotide sequence and at least one guide polynucleotide that require a PAM sequence to target binding to a target polynucleotide sequence. It should be appreciated that the characteristics of the multiplex editing using any of the base editors as described herein can be applied to any of combination of the methods of using any of the base editor provided herein. It should also be appreciated that the multiplex editing using any of the base editors as described herein can comprise a sequential editing of a plurality of nucleobase pairs.

[0770] In some embodiments, the plurality of nucleobase pairs are in one more genes. In some embodiments, the plurality of nucleobase pairs is in the same gene. In some embodiments, at least one gene in the one more genes is located in a different locus.

[0771] In some embodiments, the editing is editing of the plurality of nucleobase pairs in at least one protein coding region. In some embodiments, the editing is editing of the plurality of nucleobase pairs in at least one protein non-coding region. In some embodiments, the editing is editing of the plurality of nucleobase pairs in at least one protein coding region and at least one protein non-coding region.

[0772] In some embodiments, the editing is in conjunction with one or more guide polynucleotides. In some embodiments, the base editor system can comprise one or more base editor system. In some embodiments, the base editor system can comprise one or more base editor systems in conjunction with a single guide polynucleotide. In some embodiments, the base editor system can comprise one or more base editor system in conjunction with a plurality of guide polynucleotides. In some embodiments, the editing is in conjunction with one or more guide polynucleotide with a single base editor system. In some embodiments, the editing is in conjunction with at least one guide polynucleotide that does not require a PAM sequence to target binding to a target polynucleotide sequence. In some embodiments, the editing is in conjunction with at least one guide polynucleotide that require a PAM sequence to target binding to a target polynucleotide sequence. In some embodiments, the editing is in conjunction with a mix of at least one guide polynucleotide that does not require a PAM sequence to target binding to a target polynucleotide sequence and at least one guide polynucleotide that require a PAM sequence to target binding to a target polynucleotide sequence. It should be appreciated that the characteristics of the multiplex editing using any of the base editors as described herein can be applied to any of combination of the methods of using any of the base editors provided herein. It should also be appreciated that the editing can comprise a sequential editing of a plurality of nucleobase pairs.

[0773] In some embodiments, the base editor system capable of multiplex editing of a plurality of nucleobase pairs in one or more genes comprises one of the ABE8 base editor variants described herein. In some embodiments, the base editor system capable of multiplex editing of a plurality of nucleobase pairs in one or more genes comprises one of ABE7 base editors. In some embodiments, the base editor system capable of multiplex editing comprising one of the ABE8 base editor variants described herein has higher multiplex editing efficiency compared the base editor system capable of multiplex editing comprising one of ABE7 base editors. In some embodiments, the base editor system capable of multiplex editing comprising one of the ABE8 base editor variants described herein has at least 1%, at least 2%, at least 3%, at least 4%, at least 5%, at least 10%, at least 15%, at least 20%, at least 25%, at least 30%, at least 35%, at least 40%, at least 45%, at least 50%, at least 55%, at least 60%, at least 65%, at least 70%, at least 75%, at least 80%, at least 85%, at least 90%, at least 95%, at least 99%, at least 100%, at least 105%, at least 110%, at least 115%, at least 120%, at least 125%, at least 130%, at least 135%, at least 140%, at least 145%, at least 150%, at least 155%, at least 160%, at least 165%, at least 170%, at least 175%, at least 180%, at least 185%, at least 190%, at least 195%, at least 200%, at least 210%, at least 220%, at least 230%, at least 240%, at least 250%, at least 260%, at least 270%, at least 280%, at least 290%, at least 300% higher, at least 310%, at least 320%, at least 330%, at least 340%, at least 350%, at least 360%, at least 370%, at least 380%, at least 390%, at least 400%, at least 450%, or at least 500% higher multiplex editing efficiency compared the base editor system capable of multiplex editing comprising one of ABE7 base editors. In some embodiments, the base editor system capable of multiplex editing comprising one of the ABE8 base editor variants described herein has at least 1.1 fold, at least 1.2 fold, at least 1.3 fold, at least 1.4 fold, at least 1.5 fold, at least 1.6 fold, at least 1.7 fold, at least 1.8 fold, at least 1.9 fold, at least 2.0 fold, at least 2.1 fold, at least 2.2 fold, at least 2.3 fold, at least 2.4 fold, at least 2.5 fold, at least 2.6 fold, at least 2.7 fold, at least 2.8 fold, at least 2.9 fold, at least 3.0 fold, at least 3.1 fold, at least 3.2 fold, at least 3.3 fold, at least 3.4 fold, at least 3.5 fold, at least 4.0 fold, at least 4.5 fold, at least 5.0 fold, at least 5.5 fold, or at least 6.0 fold higher multiplex editing efficiency compared the base editor system capable of multiplex editing comprising one of ABE7 base editors.

### Methods for Editing Nucleic Acids

[0774] Some aspects of the disclosure provide methods for editing a nucleic acid. In some embodiments, the method is a method for editing a nucleobase of a nucleic acid molecule encoding a protein (e.g., a base pair of a double-stranded DNA sequence). In some embodiments, the method comprises the steps of: a) contacting a target region of a nucleic acid (e.g., a double-stranded DNA sequence) with a complex comprising a base editor (e.g., a Cas9 domain fused to an adenosine deaminase) and a guide nucleic acid (e.g., gRNA), b) inducing strand separation of said target region, c) converting a first nucleobase of said target nucleobase pair in a single strand of the target region to a second nucleobase, and d) cutting no more than one strand of said target region using the nCas9, where a third nucleobase complementary to the first nucleobase base is replaced by a fourth nucleobase complementary to the second nucleobase. In some embodiments, the method results in less than 20% indel formation in the nucleic acid. It should be appreciated that in some embodiments, step b is omitted. In some embodiments, the method results in less than 19%, 18%, 16%, 14%, 12%, 10%, 8%, 6%, 4%, 2%, 1%, 0.5%, 0.2%, or less than 0.1% indel formation. In some embodiments, the method further comprises replacing the second nucleobase with a fifth nucleobase that is complementary to the fourth nucleobase, thereby generating an intended edited base pair (e.g., G•C to A•T). In some embodiments, at least 5% of the intended base pairs are edited. In some embodiments, at least 10%, 15%, 20%, 25%, 30%, 35%, 40%, 45%, or 50% of the intended base pairs are edited.

[0775] In some embodiments, the ratio of intended products to unintended products in the target nucleotide is at least 2:1, 5:1, 10:1, 20:1, 30:1, 40:1, 50:1, 60:1, 70:1, 80:1, 90:1, 100:1, or 200:1, or more. In some embodiments, the ratio of intended mutation to indel formation is greater than 1:1, 10:1, 50:1, 100:1, 500:1, or 1000:1, or more. In some embodiments, the cut single strand (nicked strand) is hybridized to the guide nucleic acid. In some embodiments, the cut single strand is opposite to the strand comprising the first nucleobase. In some embodiments, the base editor comprises a dCas9 domain. In some embodiments, the base editor protects or binds the non-edited strand. In some embodiments, the intended edited base pair is upstream of a PAM site. In some embodiments, the intended edited base pair is 1, 2, 3, 4, 5, 6, 7, 8, 9, 10, 11, 12, 13, 14, 15, 16, 17, 18, 19, or 20 nucleotides upstream of the PAM site. In some embodiments, the intended edited base pair is downstream of a PAM site. In some embodiments, the intended edited base pair is 1, 2, 3, 4, 5, 6, 7, 8, 9, 10, 11, 12, 13, 14, 15, 16, 17, 18, 19, or 20 nucleotides downstream stream of the PAM site. In some embodiments, the method does not require a canonical (e.g., NGG) PAM site. In some embodiments, the nucleobase editor comprises a linker. In some embodiments, the linker is 1-25 amino acids in length. In some embodiments, the linker is 5-20 amino acids in length. In some embodiments, linker is 10, 11, 12, 13, 14, 15, 16, 17, 18, 19, or 20 amino acids in length. In one embodiment, the linker is 32 amino acids in length. In another embodiment, a “long linker” is at least about 60 amino acids in length. In other embodiments, the linker is between about 3-100 amino acids in length. In some embodiments, the target region comprises a target window, wherein the target window comprises the target nucleobase pair. In some embodiments, the target window comprises 1-10 nucleotides. In some embodiments, the target window is 1-9, 1-8, 1-7, 1-6, 1-5, 1-4, 1-3, 1-2, or 1 nucleotides in length. In some embodiments, the target window is 1, 2, 3, 4, 5, 6, 7, 8, 9, 10, 11, 12, 13, 14, 15, 16, 17, 18, 19, or 20 nucleotides in length. In some embodiments, the intended edited base pair is within the target window. In some embodiments, the target window comprises the intended edited base pair. In some embodiments, the method is performed using any of the base editors provided herein. In some embodiments, a target window is a methylation window.

[0776] In some embodiments, the disclosure provides methods for editing a nucleotide (e.g., SNP in a gene encoding a protein). In some embodiments, the disclosure provides a method for editing a nucleobase pair of a double-stranded DNA sequence. In some embodiments, the method comprises a) contacting a target region of the double-stranded DNA sequence with a complex comprising a base editor and a guide nucleic acid (e.g., gRNA), where the target region comprises a target nucleobase pair, b) inducing strand separation of said target region, c) converting a first nucleobase of said target nucleobase pair in a single strand of the target region to a second nucleobase, d) cutting no more than one strand of said target region, wherein a third nucleobase complementary to the first nucleobase base is replaced by a fourth nucleobase complementary to the second nucleobase, and the second nucleobase is replaced with a fifth nucleobase that is complementary to the fourth nucleobase, thereby generating an intended edited base pair, wherein the efficiency of generating the intended edited base pair is at least 5%. It should be appreciated that in some embodiments, step b is omitted. In some embodiments, at least 5% of the intended base pairs are edited. In some embodiments, at least 10%, 15%, 20%, 25%, 30%, 35%, 40%, 45%, or 50% of the intended base pairs are edited. In some embodiments, the method causes less than 19%, 18%, 16%, 14%, 12%, 10%, 8%, 6%, 4%, 2%, 1%, 0.5%, 0.2%, or less than 0.1% indel formation. In some embodiments, the ratio of intended product to unintended products at the target nucleotide is at least 2:1, 5:1, 10:1, 20:1, 30:1, 40:1, 50:1, 60:1, 70:1, 80:1, 90:1, 100:1, or 200:1, or more. In some embodiments, the ratio of intended mutation to indel formation is greater than 1:1, 10:1, 50:1, 100:1, 500:1, or 1000:1, or more. In some embodiments, the cut single strand is hybridized to the guide nucleic acid. In some embodiments, the cut single strand is opposite to the strand comprising the first nucleobase. In some embodiments, the intended edited base pair is upstream of a PAM site. In some embodiments, the intended edited base pair is 1, 2, 3, 4, 5, 6, 7, 8, 9, 10, 11, 12, 13, 14, 15, 16, 17, 18, 19, or 20 nucleotides upstream of the PAM site. In some embodiments, the intended edited base pair is downstream of a PAM site. In some embodiments, the intended edited base pair is 1, 2, 3, 4, 5, 6, 7, 8, 9, 10, 11, 12, 13, 14, 15, 16, 17, 18, 19, or 20 nucleotides downstream stream of the PAM site. In some embodiments, the method does not require a canonical (e.g., NGG) PAM site. In some embodiments, the linker is 1-25 amino acids in length. In some embodiments, the linker is 5-20 amino acids in length. In some embodiments, the linker is 10, 11, 12, 13, 14, 15, 16, 17, 18, 19, or 20 amino acids in length. In some embodiments, the target region comprises a target window, wherein the target window comprises the target nucleobase pair. In some embodiments, the target window comprises 1-10 nucleotides. In some embodiments, the target window is 1-9, 1-8, 1-7, 1-6, 1-5, 1-4, 1-3, 1-2, or 1 nucleotides in length. In some embodiments, the target window is 1, 2, 3, 4, 5, 6, 7, 8, 9, 10, 11, 12, 13, 14, 15, 16, 17, 18, 19, or 20 nucleotides in length. In some embodiments, the intended edited base pair occurs within the target window. In some embodiments, the target window comprises the intended edited base pair. In some embodiments, the nucleobase editor is any one of the base editors provided herein.

### Expression of Fusion Proteins in a Host Cell

[0777] Fusion proteins of the invention comprising an adenosine deaminase variant may be expressed in virtually any host cell of interest, including but not limited to bacteria, yeast, fungi, insects, plants, and animal cells using routine methods known to the skilled artisan. For example, a DNA encoding an adenosine deaminase of the invention can be cloned by designing suitable primers for the upstream and downstream of CDS based on the cDNA sequence. The cloned DNA may be directly, or after digestion with a restriction enzyme when desired, or after addition of a suitable linker and/or a nuclear localization signal ligated with a DNA encoding one or more additional components of a base editing system. The base editing system is translated in a host cell to form a complex.

[0778] Fusion proteins are generated by operably linking one or more polynucleotides encoding one or more domains having nucleobase modifying activity (e.g., an adenosine deaminase) to a polynucleotide encoding a napDNAbp to prepare a polynucleotide that encodes a fusion protein of the invention. In some embodiments, a polynucleotide encoding a napDNAbp, and a DNA encoding a domain having nucleobase modifying activity may each be fused with a DNA encoding a binding domain or a binding partner thereof, or both DNAs may be fused with a DNA encoding a separation intein, whereby the nucleic acid sequence-recognizing conversion module and the nucleic acid base converting enzyme are translated in a host cell to form a complex. In these cases, a linker and/or a nuclear localization signal can be linked to a suitable position of one of or both DNAs when desired.

[0779] A DNA encoding a protein domain described herein can be obtained by chemically synthesizing the DNA, or by connecting synthesized partly overlapping oligoDNA short chains by utilizing the PCR method and the Gibson Assembly method to construct a DNA encoding the full length thereof. The advantage of constructing a full-length DNA by chemical synthesis or a combination of PCR method or Gibson Assembly method is that the codon to be used can be designed in CDS full-length according to the host into which the DNA is introduced. In the expression of a heterologous DNA, the protein expression level is expected to increase by converting the DNA sequence thereof to a codon highly frequently used in the host organism. As the data of codon use frequency in host to be used, for example, the genetic code use frequency database (/www.kazusa.or.jp/codon/index.html) disclosed in the home page of Kazusa DNA Research Institute can be used, or documents showing the codon use frequency in each host may be referred to. By reference to the obtained data and the DNA sequence to be introduced, codons showing low use frequency in the host from among those used for the DNA sequence may be converted to a codon coding the same amino acid and showing high use frequency.

[0780] An expression vector containing a DNA encoding a nucleic acid sequence-recognizing module and/or a nucleic acid base converting enzyme can be produced, for example, by linking the DNA to the downstream of a promoter in a suitable expression vector.

[0781] As the expression vector, Escherichia coli-derived plasmids (e.g., pBR322, pBR325, pUC12, pUC13); Bacillus subtilis-derived plasmids (e.g., pUB110, pTP5, pC194); yeast-derived plasmids (e.g., pSH19, pSH15); insect cell expression plasmids (e.g., pFast-Bac); animal cell expression plasmids (e.g., pA1-11, pXT1, pRc/CMV, pRc/RSV, pcDNAI/Neo); bacteriophages such as .lambda.phage and the like; insect virus vectors such as baculovirus and the like (e.g., BmNPV, AcNPV); animal virus vectors such as retrovirus, vaccinia virus, adenovirus and the like, and the like are used.

[0782] As the promoter, any promoter appropriate for a host to be used for gene expression can be used. In a conventional method using DSB, since the survival rate of the host cell sometimes decreases markedly due to the toxicity, it is desirable to increase the number of cells by the start of the induction by using an inductive promoter. However, since sufficient cell proliferation can also be afforded by expressing the nucleic acid-modifying enzyme complex of the present invention, a constitution promoter can also be used without limitation.

[0783] For example, when the host is an animal cell, SR.alpha. promoter, SV40 promoter, LTR promoter, CMV (cytomegalovirus) promoter, RSV (Rous sarcoma virus) promoter, MoMuLV (Moloney mouse leukemia virus) LTR, HSV-TK (simple herpes virus thymidine kinase) promoter and the like are used. Of these, CMV promoter, SR.alpha. promoter and the like are preferable. When the host is Escherichia coli, trp promoter, lac promoter, recA promoter, lambda.P.sub.L promoter, lpp promoter, T7 promoter and the like are preferable. When the host is genus Bacillus, SPO1 promoter, SPO2 promoter, penP promoter and the like are preferable. When the host is a yeast, Gal1/10 promoter, PHOS promoter, PGK promoter, GAP promoter, ADH promoter and the like are preferable. When the host is an insect cell, polyhedrin promoter, P10 promoter and the like are preferable. When the host is a plant cell, CaMV35S promoter, CaMV19S promoter, NOS promoter and the like are preferable.

[0784] In some embodiments, the expression vector may contain an enhancer, splicing signal, terminator, polyA addition signal, a selection marker such as drug resistance gene, auxotrophic complementary gene and the like, replication origin and the like on demand.

[0785] An RNA encoding a protein domain described herein can be prepared by, for example, transcription to mRNA in a vitro transcription system known per se by using a vector encoding DNA encoding the above-mentioned nucleic acid sequence-recognizing module and/or a nucleic acid base converting enzyme as a template.

[0786] A fusion protein of the invention can be intracellularly expressed by introducing an expression vector containing a DNA encoding a nucleic acid sequence-recognizing module and/or a nucleic acid base converting enzyme into a host cell, and culturing the host cell.

[0787] Host cells useful in the invention include bacterial cells, yeast, insect cells, animal cells and the like.

[0788] The genus Escherichia includes Escherichia coli K12.cndot.DH1 (Proc. Natl. Acad. Sci. USA, 60, 160 (1968)), Escherichia coli JM103 (Nucleic Acids Research, 9, 309 (1981)), Escherichia coli JA221 (Journal of Molecular Biology, 120, 517 (1978)), Escherichia coli HB101 (Journal of Molecular Biology, 41, 459 (1969)), Escherichia coli C600 (Genetics, 39, 440 (1954)) and the like.

[0789] The genus Bacillus includes Bacillus subtilis M1114 (Gene, 24, 255 (1983)), Bacillus subtilis 207-21 (Journal of Biochemistry, 95, 87 (1984)) and the like.

[0790] Yeast useful for expression the fusion protein of the present invention include, Saccharomyces cerevisiae AH22, AH22R⁻, NA87-11A, DKD-5D, 20B-12, Schizosaccharomyces pombe NCYC1913, NCYC2036, Pichia pastoris KM71 and the like.

[0791] Fusion proteins are expressed in insect cells using, for example, viral vectors, such as AcNPV. Insect host cells include any of the following cell lines: cabbage armyworm larva-derived established line (Spodoptera frugiperda cell; Sf cell), MG1 cells derived from the mid-intestine of Trichoplusia ni, High Five™. cells derived from an egg of Trichoplusia ni, Mamestra brassicae-derived cells, Estigmena acrea-derived cells and the like are used. When the virus is BmNPV, cells of Bombyx mori-derived established line (Bombyx mori N cell; BmN cell) and the like are used as insect cells. As the Sf cell, for example, Sf9 cell (ATCC CRL1711), Sf21 cell (all above, In Vivo, 13, 213-217 (1977)) and the like.

[0792] As the insect, for example, larva of Bombyx mori, Drosophila, cricket and the like are used to express fusion proteins of the invention (Nature, 315, 592 (1985)).

[0793] Mammalian cell lines may be used to express fusion proteins. Such cell lines include monkey COS-7 cell, monkey Vero cell, Chinese hamster ovary (CHO) cell, dhfr gene-deficient CHO cell, mouse L cell, mouse AtT-20 cell, mouse myeloma cell, rat GH3 cell, human FL cell and the like, pluripotent stem cells such as iPS cell, ES cell and the like of human and other mammals, and primary cultured cells prepared from various tissues. Furthermore, zebrafish embryo, Xenopus oocyte and the like can also be used.

[0794] Plant cells may be maintained in culture using methods well known to the skilled artisan. Plant cell culture involves suspending cultured cells, callus, protoplast, leaf segment, root segment and the like prepared from various plants (e.g., grain such as rice, wheat, corn and the like, product crops such as tomato, cucumber, eggplant, carnations, Eustoma russellianum, tobacco, Arabidopsis thaliana).

[0795] All the above-mentioned host cells may be haploid (monoploid), or polyploid (e.g., diploid, triploid, tetraploid and the like). In the conventional mutation introduction methods, mutation is, in principle, introduced into only one homologous chromosome to produce a hetero gene type. Therefore, desired phenotype is not expressed unless dominant mutation occurs, and homozygousness inconveniently requires labor and time. In contrast, according to the present invention, since mutation can be introduced into any allele on the homologous chromosome in the genome, desired phenotype can be expressed in a single generation even in the case of recessive mutation, which is extremely useful since the problem of the conventional method can be solved.

[0796] Expression vectors encoding a fusion protein of the invention are introduced into host cells using any transfection method (e.g., lysozyme method, competent method, PEG method, CaCl₂ coprecipitation method, electroporation method, the microinjection method, the particle gun method, lipofection method, Agrobacterium method). The transfection method is selected based on the host cell to be transfected.

[0797] Escherichia coli can be transformed according to the methods described in, for example, Proc. Natl. Acad. Sci. USA, 69, 2110 (1972), Gene, 17, 107 (1982) and the like.

[0798] The genus Bacillus can be introduced into a vector according to the methods described in, for example, Molecular & General Genetics, 168, 111 (1979) and the like.

[0799] Yeast cells can be introduced into a vector according to the methods described in, for example, Methods in Enzymology, 194, 182-187 (1991), Proc. Natl. Acad. Sci. USA, 75, 1929 (1978) and the like.

[0800] Insect cells can be introduced into a vector according to the methods described in, for example, Bio/Technology, 6, 47-55 (1988) and the like.

[0801] Mammalian cells can be introduced into a vector according to the methods described in, for example, Cell Engineering additional volume 8, New Cell Engineering Experiment Protocol, 263-267 (1995) (published by Shujunsha), and Virology, 52, 456 (1973). Cells comprising expression vectors of the invention are cultured according to known methods, which vary depending on the host.

[0802] For example, when Escherichia coli or genus Bacillus are cultured, a liquid medium is preferable as a medium to be used for the culture. The medium preferably contains a carbon source, nitrogen source, inorganic substance and the like necessary for the growth of the transformant. Examples of the carbon source include glucose, dextrin, soluble starch, sucrose and the like; examples of the nitrogen source include inorganic or organic substances such as ammonium salts, nitrate salts, corn steep liquor, peptone, casein, meat extract, soybean cake, potato extract and the like; and examples of the inorganic substance include calcium chloride, sodium dihydrogen phosphate, magnesium chloride and the like. The medium may contain yeast extract, vitamins, growth promoting factor and the like. The pH of the medium is preferably about 5-about 8.

[0803] As a medium for culturing Escherichia coli, for example, M9 medium containing glucose, casamino acid (Journal of Experiments in Molecular Genetics, 431-433, Cold Spring Harbor Laboratory, New York 1972) is preferable. Where necessary, for example, agents such as 3.beta.-indolylacrylic acid may be added to the medium to ensure an efficient function of a promoter. Escherichia coli is cultured at generally about 15-about 43° C. Where necessary, aeration and stirring may be performed.

[0804] The genus Bacillus is cultured at generally about 30-about 40° C. Where necessary, aeration and stirring may be performed.

[0805] Examples of the medium for culturing yeast include Burkholder minimum medium (Proc. Natl. Acad. Sci. USA, 77, 4505 (1980)), SD medium containing 0.5% casamino acid (Proc. Natl. Acad. Sci. USA, 81, 5330 (1984)) and the like. The pH of the medium is preferably about 5-about 8. The culture is performed at generally about 20° C.-about 35° C. Where necessary, aeration and stirring may be performed.

[0806] As a medium for culturing an insect cell or insect, for example, Grace's Insect Medium (Nature, 195, 788 (1962)) containing an additive such as inactivated 10% bovine serum and the like as appropriate and the like are used. The pH of the medium is preferably about 6.2 to about 6.4. The culture is performed at generally about 27° C. Where necessary, aeration and stirring may be performed.

[0807] As a medium for culturing an animal cell, for example, minimum essential medium (MEM) containing about 5-about 20% of fetal bovine serum (Science, 122, 501 (1952)), Dulbecco's modified Eagle medium (DMEM) (Virology, 8, 396 (1959)), RPMI 1640 medium (The Journal of the American Medical Association, 199, 519 (1967)), 199 medium (Proceeding of the Society for the Biological Medicine, 73, 1 (1950)) and the like are used. The pH of the medium is preferably about 6-about 8. The culture is performed at generally about 30° C.-about 40° C. Where necessary, aeration and stirring may be performed.

[0808] As a medium for culturing a plant cell, for example, MS medium, LS medium, B5 medium and the like are used. The pH of the medium is preferably about 5-about 8. The culture is performed at generally about 20° C.-about 30° C. Where necessary, aeration and stirring may be performed.

[0809] When a higher eukaryotic cell, such as animal cell, insect cell, plant cell and the like is used as a host cell, a DNA encoding a base editing system of the present invention (e.g., comprising an adenosine deaminase variant) is introduced into a host cell under the regulation of an inducible promoter (e.g., metallothionein promoter (induced by heavy metal ion), heat shock protein promoter (induced by heat shock), Tet-ON/Tet-OFF system promoter (induced by addition or removal of tetracycline or a derivative thereof), steroid-responsive promoter (induced by steroid hormone or a derivative thereof) etc.), the induction substance is added to the medium (or removed from the medium) at an appropriate stage to induce expression of the nucleic acid-modifying enzyme complex, culture is performed for a given period to carry out a base editing and, introduction of a mutation into a target gene, transient expression of the base editing system can be realized.

[0810] Prokaryotic cells such as Escherichia coli and the like can utilize an inducible promoter. Examples of the inducible promoter include, but are not limited to, lac promoter (induced by IPTG), cspA promoter (induced by cold shock), araBAD promoter (induced by arabinose) and the like.

[0811] Alternatively, the above-mentioned inductive promoter can also be utilized as a vector removal mechanism when higher eukaryotic cells, such as animal cell, insect cell, plant cell and the like are used as a host cell. That is, a vector is mounted with a replication origin that functions in a host cell, and a nucleic acid encoding a protein necessary for replication (e.g., SV40 on and large T antigen, oriP and EBNA-1 etc. for animal cells), of the expression of the nucleic acid encoding the protein is regulated by the above-mentioned inducible promoter. As a result, while the vector is autonomously replicatable in the presence of an induction substance, when the induction substance is removed, autonomous replication is not available, and the vector naturally falls off along with cell division (autonomous replication is not possible by the addition of tetracycline and doxycycline in Tet-OFF system vector).

### Methods of Using Base Editors

[0812] The correction of point mutations in disease-associated genes and alleles provides new strategies for gene correction with applications in therapeutics and basic research.

[0813] The present disclosure provides methods for the treatment of a subject diagnosed with a disease associated with or caused by a point mutation that can be corrected by a base editor system provided herein. For example, in some embodiments, a method is provided that comprises administering to a subject having such a disease, e.g., a disease caused by a genetic mutation, an effective amount of a nucleobase editor (e.g., an adenosine deaminase base editor or a cytidine deaminase base editor) that corrects the point mutation in the disease associated gene. The present disclosure provides methods for the treatment of diseases that are associated with or caused by a point mutation that can be corrected by deaminase-mediated gene editing. Suitable diseases that can be treated with the strategies and fusion proteins provided herein will be apparent to those of skill in the art based on the instant disclosure. Provided herein are methods of using a base editor or base editor system for editing a nucleobase in a target nucleotide sequence associated with a disease or disorder. In some embodiments, the activity of the base editor (e.g., comprising an adenosine deaminase and a Cas12 domain) results in a correction of the point mutation. In some embodiments, the target DNA sequence comprises a G→A point mutation associated with a disease or disorder, and deamination of the mutant A base results in a sequence that is not associated with a disease or disorder. In some embodiments, the target DNA sequence comprises a T→C point mutation associated with a disease or disorder, and deamination of the mutant C base results in a sequence that is not associated with a disease or disorder.

[0814] In some embodiments, the target DNA sequence encodes a protein, and the point mutation is in a codon and results in a change in the amino acid encoded by the mutant codon as compared to the wild-type codon. In some embodiments, the deamination of the mutant A results in a change of the amino acid encoded by the mutant codon. In some embodiments, the deamination of the mutant A results in the codon encoding the wild-type amino acid. In some embodiments, the deamination of the mutant C results in a change of the amino acid encoded by the mutant codon. In some embodiments, the deamination of the mutant C results in the codon encoding the wild-type amino acid. In some embodiments, the subject has or has been diagnosed with a disease or disorder.

[0815] In some embodiments, the adenosine deaminases provided herein are capable of deaminating a deoxyadenosine residue of DNA. Other aspects of the disclosure provide fusion proteins that comprise an adenosine deaminase (e.g., an adenosine deaminase that deaminates deoxyadenosine in DNA as described herein) and a domain (e.g., a Cas12) capable of binding to a specific nucleotide sequence. For example, the adenosine can be converted to an inosine residue, which typically base pairs with a cytosine residue. Such fusion proteins are useful, inter alia, for targeted editing of nucleic acid sequences. Such fusion proteins can be used for targeted editing of DNA in vitro, e.g., for the generation of mutant cells or animals; for the introduction of targeted mutations, e.g., for the correction of genetic defects in cells ex vivo, e.g., in cells obtained from a subject that are subsequently re-introduced into the same or another subject; and for the introduction of targeted mutations in vivo, e.g., the correction of genetic defects or the introduction of deactivating mutations in disease-associated genes in a G to A, or a T to C to mutation can be treated using the nucleobase editors provided herein. The present disclosure provides deaminases, fusion proteins, nucleic acids, vectors, cells, compositions, methods, kits, systems, etc. that utilize the deaminases and nucleobase editors.

### Generating an Intended Mutation

[0816] In some embodiments, the purpose of the methods provided herein is to restore the function of a dysfunctional gene via gene editing. In some embodiments, the function of a dysfunctional gene is restored by introducing an intended mutation. In some embodiments, the methods provided herein can be used to disrupt the normal function of a gene product. The nucleobase editing proteins provided herein can be validated for gene editing-based human therapeutics in vitro, e.g., by correcting a disease-associated mutation in human cell culture. It will be understood by the skilled artisan that the nucleobase editing proteins provided herein, e.g., the fusion proteins comprising a napDNAbp domain (e.g., Cas12) and a nucleobase editing domain (e.g., an adenosine deaminase domain or a cytidine deaminase domain) can be used to correct any single point A to G or C to T mutation. In the first case, deamination of the mutant A to I corrects the mutation, and in the latter case, deamination of the A that is base-paired with the mutant T, followed by a round of replication, corrects the mutation.

[0817] In some embodiments, the present disclosure provides base editors that efficiently generate an intended mutation, such as a point mutation, in a nucleic acid (e.g., a nucleic acid within a genome of a subject) without generating a significant number of unintended mutations, such as unintended point mutations. In some embodiments, an intended mutation is a mutation that is generated by a specific base editor (e.g., cytidine base editor or adenosine base editor) bound to a guide polynucleotide (e.g., gRNA), specifically designed to generate the intended mutation. In some embodiments, the intended mutation is a mutation associated with a disease or disorder. In some embodiments, the intended mutation is an adenine (A) to guanine (G) point mutation associated with a disease or disorder. In some embodiments, the intended mutation is a cytosine (C) to thymine (T) point mutation associated with a disease or disorder. In some embodiments, the intended mutation is an adenine (A) to guanine (G) point mutation within the coding region or non-coding region of a gene. In some embodiments, the intended mutation is a cytosine (C) to thymine (T) point mutation within the coding region or non-coding region of a gene. In some embodiments, the intended mutation is a point mutation that generates a stop codon, for example, a premature stop codon within the coding region of a gene. In some embodiments, the intended mutation is a mutation that eliminates a stop codon.

[0818] In some embodiments, any of the base editors provided herein are capable of generating a ratio of intended mutations to unintended mutations (e.g., intended point mutations:unintended point mutations) that is greater than 1:1. In some embodiments, any of the base editors provided herein are capable of generating a ratio of intended mutations to unintended mutations (e.g., intended point mutations:unintended point mutations) that is at least 1.5:1, at least 2:1, at least 2.5:1, at least 3:1, at least 3.5:1, at least 4:1, at least 4.5:1, at least 5:1, at least 5.5:1, at least 6:1, at least 6.5:1, at least 7:1, at least 7.5:1, at least 8:1, at least 10:1, at least 12:1, at least 15:1, at least 20:1, at least 25:1, at least 30:1, at least 40:1, at least 50:1, at least 100:1, at least 150:1, at least 200:1, at least 250:1, at least 500:1, or at least 1000:1, or more

[0819] Details of base editor efficiency are described in International PCT Application Nos. PCT/2017/045381 (WO 2018/027078) and PCT/US2016/058344 (WO 2017/070632), each of which is incorporated herein by reference for its entirety. Also see Komor, A. C., et al., “Programmable editing of a target base in genomic DNA without double-stranded DNA cleavage” Nature 533, 420-424 (2016); Gaudelli, N. M., et al., “Programmable base editing of A•T to G•C in genomic DNA without DNA cleavage” Nature 551, 464-471 (2017); and Komor, A. C., et al., “Improved base excision repair inhibition and bacteriophage Mu Gam protein yields C:G-to-T:A base editors with higher efficiency and product purity” Science Advances 3:eaao4774 (2017), the entire contents of which are hereby incorporated by reference.

[0820] In some embodiments, editing of a plurality of nucleobase pairs in one or more genes using the methods provided herein results in formation of at least one intended mutation. In some embodiments, said formation of said at least one intended mutation results in a precise correction of a disease-causing mutation. It should be appreciated that multiplex editing can be accomplished using any method or combination of methods provided herein.

### Delivery System

[0821] Nucleic Acid-Based Delivery of a Nucleobase Editors and gRNAs

[0822] Nucleic acids encoding base editing systems according to the present disclosure can be administered to subjects or delivered into cells in vitro or in vivo by art-known methods or as described herein. In one embodiment, nucleobase editors can be delivered by, e.g., vectors (e.g., viral or non-viral vectors), non-vector based methods (e.g., using naked DNA, DNA complexes, mRNA, lipid nanoparticles), or a combination thereof.

[0823] Nucleic acids encoding nucleobase editors can be delivered directly to cells (e.g., hematopoietic cells or their progenitors, hematopoietic stem cells, and/or induced pluripotent stem cells) as naked DNA or RNA, e.g., mRNA, for instance by means of transfection or electroporation, or can be conjugated to molecules (e.g., N-acetylgalactosamine) promoting uptake by the target cells. Nucleic acid vectors, such as the vectors described herein can also be used.

[0824] Nucleic acid vectors can comprise one or more sequences encoding a domain of a fusion protein described herein. A vector can also comprise a sequence encoding a signal peptide (e.g., for nuclear localization, nucleolar localization, or mitochondrial localization), associated with (e.g., inserted into or fused to) a sequence coding for a protein. As one example, a nucleic acid vectors can include a Cas9 coding sequence that includes one or more nuclear localization sequences (e.g., a nuclear localization sequence from SV40), and an adenosine deaminase variant (e.g., ABE8).

[0825] The nucleic acid vector can also include any suitable number of regulatory/control elements, e.g., promoters, enhancers, introns, polyadenylation signals, Kozak consensus sequences, or internal ribosome entry sites (IRES). These elements are well known in the art. For hematopoietic cells suitable promoters can include IFNbeta or CD45.

[0826] Nucleic acid vectors according to this disclosure include recombinant viral vectors. Exemplary viral vectors are set forth herein. Other viral vectors known in the art can also be used. In addition, viral particles can be used to deliver base editing system components in nucleic acid and/or peptide form. For example, “empty” viral particles can be assembled to contain any suitable cargo. Viral vectors and viral particles can also be engineered to incorporate targeting ligands to alter target tissue specificity.

[0827] In addition to viral vectors, non-viral vectors can be used to deliver nucleic acids encoding genome editing systems according to the present disclosure. One important category of non-viral nucleic acid vectors are nanoparticles, which can be organic or inorganic. Nanoparticles are well known in the art. Any suitable nanoparticle design can be used to deliver genome editing system components or nucleic acids encoding such components. For instance, organic (e.g. lipid and/or polymer) nanoparticles can be suitable for use as delivery vehicles in certain embodiments of this disclosure. Exemplary lipids for use in nanoparticle formulations, and/or gene transfer are shown in Table 10 (below).

TABLE 10
Lipids Used for Gene Transfer

| Lipid | Abbreviation | Feature |
|---|---|---|
| 1,2-Dioleoyl-sn-glycero-3-phosphatidylcholine | DOPC | Helper |
| 1,2-Dioleoyl-sn-glycero-3-phosphatidylethanolamine | DOPE | Helper |
| Cholesterol | | Helper |
| N-[1-(2,3-Dioleyloxy)prophyl]N,N,N-trimethylammonium | DOTMA | Cationic |
| chloride | | |
| 1,2-Dioleoyloxy-3-trimethylammonium-propane | DOTAP | Cationic |
| Dioctadecylamidoglycylspermine | DOGS | Cationic |
| N-(3-Aminopropyl)-N,N-dimethyl-2,3-bis(dodecyloxy)-1- | GAP-DLRIE | Cationic |
| propanaminium bromide | | |
| Cetyltrimethylammonium bromide | CTAB | Cationic |
| 6-Lauroxyhexyl ornithinate | LHON | Cationic |
| 1-(2,3-Dioleoyloxypropyl)-2,4,6-trimethylpyridinium | 2Oc | Cationic |
| 2,3-Dioleyloxy-N-[2(sperminecarboxamido-ethyl]-N,N- | DOSPA | Cationic |
| dimethyl-1-propanaminium trifluoroacetate | | |
| 1,2-Dioleyl-3-trimethylammonium-propane | DOPA | Cationic |
| N-(2-Hydroxyethyl)-N,N-dimethyl-2,3-bis(tetradecyloxy)-1- | MDRIE | Cationic |
| propanaminium bromide | | |
| Dimyristooxypropyl dimethyl hydroxyethyl ammonium bromide | DMRI | Cationic |
| 3β-[N-(N′,N′-Dimethylaminoethane)-carbamoyl]cholesterol | DC-Chol | Cationic |
| Bis-guanidium-tren-cholesterol | BGTC | Cationic |
| 1,3-Diodeoxy-2-(6-carboxy-spermyl)-propylamide | DOSPER | Cationic |
| Dimethyloctadecylammonium bromide | DDAB | Cationic |
| Dioctadecylamidoglicylspermidin | DSL | Cationic |
| rac-[(2,3-Dioctadecyloxypropyl)(2-hydroxyethyl)]- | CLIP-1 | Cationic |
| dimethylammonium chloride | | |
| rac-[2(2,3-Dihexadecyloxypropyl- | CLIP-6 | Cationic |
| oxymethyloxy)ethyl]trimethylammoniun bromide | | |
| Ethyldimyristoylphosphatidylcholine | EDMPC | Cationic |
| 1,2-Distearyloxy-N,N-dimethyl-3-aminopropane | DSDMA | Cationic |
| 1,2-Dimyristoyl-trimethylammonium propane | DMTAP | Cationic |
| O,O′-Dimyristyl-N-lysyl aspartate | DMKE | Cationic |
| 1,2-Distearoyl-sn-glycero-3-ethylpho sphocholine | DSEPC | Cationic |
| N-Palmitoyl D-erythro-sphingosyl carbamoyl-spermine | CCS | Cationic |
| N-t-Butyl-N0-tetradecyl-3-tetradecylaminopropionamidine | diC14-amidine | Cationic |
| Octadecenolyoxy[ethyl-2-heptadecenyl-3 hydroxyethyl] | DOTIM | Cationic |
| imidazolinium chloride | | |
| N1-Cholesteryloxycarbonyl-3,7-diazanonane-1,9-diamine | CDAN | Cationic |
| 2-(3-[Bis(3-amino-propyl)-amino]propylamino)-N- | RPR209120 | Cationic |
| ditetradecylcarbamoylme-ethyl-acetamide | | |
| 1,2-dilinoleyloxy-3-dimethylaminopropane | DLinDMA | Cationic |
| 2,2-dilinoleyl-4-dimethylaminoethyl-[1,3]-dioxolane | DLin-KC2-DMA | Cationic |
| dilinoleyl-methyl-4-dimethylaminobutyrate | DLin-MC3-DMA | Cationic |

[0828] Table 11 lists exemplary polymers for use in gene transfer and/or nanoparticle formulations.

TABLE 11
Polymers Used for Gene Transfer

| Polymer | Abbreviation |
|---|---|
| Poly(ethylene)glycol | PEG |
| Polyethylenimine | PEI |
| Dithiobis (succinimidylpropionate) | DSP |
| Dimethyl-3,3′-dithiobispropionimidate | DTBP |
| Poly(ethylene imine)biscarbamate | PEIC |
| Poly(L-lysine) | PLL |
| Histidine modified PLL | |
| Poly(N-vinylpyrrolidone) | PVP |
| Poly(propylenimine) | PPI |
| Poly(amidoamine) | PAMAM |
| Poly(amidoethylenimine) | SS-PAEI |
| Triethylenetetramine | TETA |
| Poly(β-aminoester) | |
| Poly(4-hydroxy-L-proline ester) | PHP |
| Poly(allylamine) | |
| Poly(α-[4-aminobutyl]-L-glycolic acid) | PAGA |
| Poly(D,L-lactic-co-glycolic acid) | PLGA |
| Poly(N-ethyl-4-vinylpyridinium bromide) | |
| Poly(phosphazene)s | PPZ |
| Poly(phosphoester)s | PPE |
| Poly(phosphoramidate)s | PPA |
| Poly(N-2-hydroxypropylmethacrylamide) | pHPMA |
| Poly (2-(dimethylamino)ethyl methacrylate) | pDMAEMA |
| Poly(2-aminoethyl propylene phosphate) | PPE-EA |
| Chitosan | |
| Galactosylated chitosan | |
| N-Dodacylated chitosan | |
| Histone | |
| Collagen | |
| Dextran-spermine | D-SPM |

[0829] Table 12 summarizes delivery methods for a polynucleotide encoding a fusion protein described herein.

TABLE 12

| | | Delivery into | | | Type of |
|---|---|---|---|---|---|
| | | Non-Dividing | Duration of | Genome | Molecule |
| Delivery | Vector/Mode | Cells | Expression | Integration | Delivered |
| Physical | (e.g., | YES | Transient | NO | Nucleic Acids |
| | electroporation, | | | | and Proteins |
| | particle gun, | | | | |
| | Calcium | | | | |
| | Phosphate | | | | |
| | transfection | | | | |
| Viral | Retrovirus | NO | Stable | YES | RNA |
| | Lentivirus | YES | Stable | YES/NO with | RNA |
| | | | | modification | |
| | Adenovirus | YES | Transient | NO | DNA |
| | Adeno- | YES | Stable | NO | DNA |
| | Associated | | | | |
| | Virus (AAV) | | | | |
| | Vaccinia Virus | YES | Very | NO | DNA |
| | | | Transient | | |
| | Herpes Simplex | YES | Stable | NO | DNA |
| | Virus | | | | |
| Non-Viral | Cationic | YES | Transient | Depends on | Nucleic Acids |
| | Liposomes | | | what is | and Proteins |
| | | | | delivered | |
| | Polymeric | YES | Transient | Depends on | Nucleic Acids |
| | Nanoparticles | | | what is | and Proteins |
| | | | | delivered | |
| Biological | Attenuated | YES | Transient | NO | Nucleic Acids |
| Non-Viral | Bacteria | | | | |
| Delivery | Engineered | YES | Transient | NO | Nucleic Acids |
| Vehicles | Bacteriophages | YES | Transient | NO | Nucleic Acids |
| | Mammalian | | | | |
| | Virus-like | | | | |
| | Particles | | | | |
| | Biological | YES | Transient | NO | Nucleic Acids |
| | liposomes: | | | | |
| | Erythrocyte | | | | |
| | Ghosts and | | | | |
| | Exosomes | | | | |

[0830] In another aspect, the delivery of genome editing system components or nucleic acids encoding such components, for example, a nucleic acid binding protein such as, for example, Cas9 or variants thereof, and a gRNA targeting a genomic nucleic acid sequence of interest, may be accomplished by delivering a ribonucleoprotein (RNP) to cells. The RNP comprises the nucleic acid binding protein, e.g., Cas9, in complex with the targeting gRNA. RNPs may be delivered to cells using known methods, such as electroporation, nucleofection, or cationic lipid-mediated methods, for example, as reported by Zuris, J. A. et al., 2015, Nat. Biotechnology, 33(1):73-80. RNPs are advantageous for use in CRISPR base editing systems, particularly for cells that are difficult to transfect, such as primary cells. In addition, RNPs can also alleviate difficulties that may occur with protein expression in cells, especially when eukaryotic promoters, e.g., CMV or EF1A, which may be used in CRISPR plasmids, are not well-expressed. Advantageously, the use of RNPs does not require the delivery of foreign DNA into cells. Moreover, because an RNP comprising a nucleic acid binding protein and gRNA complex is degraded over time, the use of RNPs has the potential to limit off-target effects. In a manner similar to that for plasmid based techniques, RNPs can be used to deliver binding protein (e.g., Cas9 variants) and to direct homology directed repair (HDR).

[0831] A promoter used to drive base editor coding nucleic acid molecule expression can include AAV ITR. This can be advantageous for eliminating the need for an additional promoter element, which can take up space in the vector. The additional space freed up can be used to drive the expression of additional elements, such as a guide nucleic acid or a selectable marker. ITR activity is relatively weak, so it can be used to reduce potential toxicity due to over expression of the chosen nuclease.

[0832] Any suitable promoter can be used to drive expression of the base editor and, where appropriate, the guide nucleic acid. For ubiquitous expression, promoters that can be used include CMV, CAG, CBh, PGK, SV40, Ferritin heavy or light chains, etc. For brain or other CNS cell expression, suitable promoters can include: SynapsinI for all neurons, CaMKIIalpha for excitatory neurons, GAD67 or GAD65 or VGAT for GABAergic neurons, etc. For liver cell expression, suitable promoters include the Albumin promoter. For lung cell expression, suitable promoters can include SP-B. For endothelial cells, suitable promoters can include ICAM. For hematopoietic cells suitable promoters can include IFNbeta or CD45. For Osteoblasts suitable promoters can include OG-2.

[0833] In some embodiments, a base editor of the present disclosure is of small enough size to allow separate promoters to drive expression of the base editor and a compatible guide nucleic acid within the same nucleic acid molecule. For instance, a vector or viral vector can comprise a first promoter operably linked to a nucleic acid encoding the base editor and a second promoter operably linked to the guide nucleic acid.

[0834] The promoter used to drive expression of a guide nucleic acid can include: Pol III promoters such as U6 or H1 Use of Pol II promoter and intronic cassettes to express gRNA Adeno Associated Virus (AAV).

### Viral Vectors

[0835] A base editor described herein can therefore be delivered with viral vectors. In some embodiments, a base editor disclosed herein can be encoded on a nucleic acid that is contained in a viral vector. In some embodiments, one or more components of the base editor system can be encoded on one or more viral vectors. For example, a base editor and guide nucleic acid can be encoded on a single viral vector. In other embodiments, the base editor and guide nucleic acid are encoded on different viral vectors. In either case, the base editor and guide nucleic acid can each be operably linked to a promoter and terminator. The combination of components encoded on a viral vector can be determined by the cargo size constraints of the chosen viral vector.

[0836] The use of RNA or DNA viral based systems for the delivery of a base editor takes advantage of highly evolved processes for targeting a virus to specific cells in culture or in the host and trafficking the viral payload to the nucleus or host cell genome. Viral vectors can be administered directly to cells in culture, patients (in vivo), or they can be used to treat cells in vitro, and the modified cells can optionally be administered to patients (ex vivo). Conventional viral based systems could include retroviral, lentivirus, adenoviral, adeno-associated and herpes simplex virus vectors for gene transfer. Integration in the host genome is possible with the retrovirus, lentivirus, and adeno-associated virus gene transfer methods, often resulting in long term expression of the inserted transgene. Additionally, high transduction efficiencies have been observed in many different cell types and target tissues.

[0837] Viral vectors can include lentivirus (e.g., HIV and FIV-based vectors), Adenovirus (e.g., AD100), Retrovirus (e.g., Maloney murine leukemia virus, MML-V), herpesvirus vectors (e.g., HSV-2), and Adeno-associated viruses (AAVs), or other plasmid or viral vector types, in particular, using formulations and doses from, for example, U.S. Pat. No. 8,454,972 (formulations, doses for adenovirus), U.S. Pat. No. 8,404,658 (formulations, doses for AAV) and U.S. Pat. No. 5,846,946 (formulations, doses for DNA plasmids) and from clinical trials and publications regarding the clinical trials involving lentivirus, AAV and adenovirus. For example, for AAV, the route of administration, formulation and dose can be as in U.S. Pat. No. 8,454,972 and as in clinical trials involving AAV. For Adenovirus, the route of administration, formulation and dose can be as in U.S. Pat. No. 8,404,658 and as in clinical trials involving adenovirus. For plasmid delivery, the route of administration, formulation and dose can be as in U.S. Pat. No. 5,846,946 and as in clinical studies involving plasmids. Doses can be based on or extrapolated to an average 70 kg individual (e.g. a male adult human), and can be adjusted for patients, subjects, mammals of different weight and species. Frequency of administration is within the ambit of the medical or veterinary practitioner (e.g., physician, veterinarian), depending on usual factors including the age, sex, general health, other conditions of the patient or subject and the particular condition or symptoms being addressed. The viral vectors can be injected into the tissue of interest. For cell-type specific base editing, the expression of the base editor and optional guide nucleic acid can be driven by a cell-type specific promoter.

[0838] The tropism of a retrovirus can be altered by incorporating foreign envelope proteins, expanding the potential target population of target cells. Lentiviral vectors are retroviral vectors that are able to transduce or infect non-dividing cells and typically produce high viral titers. Selection of a retroviral gene transfer system would therefore depend on the target tissue. Retroviral vectors are comprised of cis-acting long terminal repeats with packaging capacity for up to 6-10 kb of foreign sequence. The minimum cis-acting LTRs are sufficient for replication and packaging of the vectors, which are then used to integrate the therapeutic gene into the target cell to provide permanent transgene expression. Widely used retroviral vectors include those based upon murine leukemia virus (MuLV), gibbon ape leukemia virus (GaLV), Simian Immuno deficiency virus (SIV), human immuno deficiency virus (HIV), and combinations thereof (See, e.g., Buchscher et al., J. Virol. 66:2731-2739 (1992); Johann et al., J. Virol. 66:1635-1640 (1992); Sommnerfelt et al., Virol. 176:58-59 (1990); Wilson et al., J. Virol. 63:2374-2378 (1989); Miller et al., J. Virol. 65:2220-2224 (1991); PCT/US94/05700).

[0839] Retroviral vectors, especially lentiviral vectors, can require polynucleotide sequences smaller than a given length for efficient integration into a target cell. For example, retroviral vectors of length greater than 9 kb can result in low viral titers compared with those of smaller size. In some aspects, a base editor of the present disclosure is of sufficient size so as to enable efficient packaging and delivery into a target cell via a retroviral vector. In some embodiments, a base editor is of a size so as to allow efficient packing and delivery even when expressed together with a guide nucleic acid and/or other components of a targetable nuclease system.

[0840] In applications where transient expression is preferred, adenoviral based systems can be used. Adenoviral based vectors are capable of very high transduction efficiency in many cell types and do not require cell division. With such vectors, high titer and levels of expression have been obtained. This vector can be produced in large quantities in a relatively simple system. Adeno-associated virus (“AAV”) vectors can also be used to transduce cells with target nucleic acids, e.g., in the in vitro production of nucleic acids and peptides, and for in vivo and ex vivo gene therapy procedures (See, e.g., West et al., Virology 160:38-47 (1987); U.S. Pat. No. 4,797,368; WO 93/24641; Kotin, Human Gene Therapy 5:793-801 (1994); Muzyczka, J. Clin. Invest. 94:1351 (1994). The construction of recombinant AAV vectors is described in a number of publications, including U.S. Pat. No. 5,173,414; Tratschin et al., Mol. Cell. Biol. 5:3251-3260 (1985); Tratschin, et al., Mol. Cell. Biol. 4:2072-2081 (1984); Hermonat & Muzyczka, PNAS 81:6466-6470 (1984); and Samulski et al., J. Virol. 63:03822-3828 (1989).

[0841] AAV is a small, single-stranded DNA dependent virus belonging to the parvovirus family. The 4.7 kb wild-type (wt) AAV genome is made up of two genes that encode four replication proteins and three capsid proteins, respectively, and is flanked on either side by 145-bp inverted terminal repeats (ITRs). The virion is composed of three capsid proteins, Vp1, Vp2, and Vp3, produced in a 1:1:10 ratio from the same open reading frame but from differential splicing (Vp1) and alternative translational start sites (Vp2 and Vp3, respectively). Vp3 is the most abundant subunit in the virion and participates in receptor recognition at the cell surface defining the tropism of the virus. A phospholipase domain, which functions in viral infectivity, has been identified in the unique N terminus of Vp1.

[0842] Similar to wt AAV, recombinant AAV (rAAV) utilizes the cis-acting 145-bp ITRs to flank vector transgene cassettes, providing up to 4.5 kb for packaging of foreign DNA. Subsequent to infection, rAAV can express a fusion protein of the invention and persist without integration into the host genome by existing episomally in circular head-to-tail concatemers. Although there are numerous examples of rAAV success using this system, in vitro and in vivo, the limited packaging capacity has limited the use of AAV-mediated gene delivery when the length of the coding sequence of the gene is equal or greater in size than the wt AAV genome.

[0843] Viral vectors can be selected based on the application. For example, for in vivo gene delivery, AAV can be advantageous over other viral vectors. In some embodiments, AAV allows low toxicity, which can be due to the purification method not requiring ultra-centrifugation of cell particles that can activate the immune response. In some embodiments, AAV allows low probability of causing insertional mutagenesis because it doesn't integrate into the host genome. Adenoviruses are commonly used as vaccines because of the strong immunogenic response they induce. Packaging capacity of the viral vectors can limit the size of the base editor that can be packaged into the vector.

[0844] AAV has a packaging capacity of about 4.5 Kb or 4.75 Kb including two 145 base inverted terminal repeats (ITRs). This means disclosed base editor as well as a promoter and transcription terminator can fit into a single viral vector. Constructs larger than 4.5 or 4.75 Kb can lead to significantly reduced virus production. For example, SpCas9 is quite large, the gene itself is over 4.1 Kb, which makes it difficult for packing into AAV. Therefore, embodiments of the present disclosure include utilizing a disclosed base editor which is shorter in length than conventional base editors. In some examples, the base editors are less than 4 kb. Disclosed base editors can be less than 4.5 kb, 4.4 kb, 4.3 kb, 4.2 kb, 4.1 kb, 4 kb, 3.9 kb, 3.8 kb, 3.7 kb, 3.6 kb, 3.5 kb, 3.4 kb, 3.3 kb, 3.2 kb, 3.1 kb, 3 kb, 2.9 kb, 2.8 kb, 2.7 kb, 2.6 kb, 2.5 kb, 2 kb, or 1.5 kb. In some embodiments, the disclosed base editors are 4.5 kb or less in length.

[0845] An AAV can be AAV1, AAV2, AAV5 or any combination thereof. One can select the type of AAV with regard to the cells to be targeted; e.g., one can select AAV serotypes 1, 2, 5 or a hybrid capsid AAV1, AAV2, AAV5 or any combination thereof for targeting brain or neuronal cells; and one can select AAV4 for targeting cardiac tissue. AAV8 is useful for delivery to the liver. A tabulation of certain AAV serotypes as to these cells can be found in Grimm, D. et al, J. Virol. 82: 5887-5911 (2008)).

[0846] Lentiviruses are complex retroviruses that have the ability to infect and express their genes in both mitotic and post-mitotic cells. The most commonly known lentivirus is the human immunodeficiency virus (HIV), which uses the envelope glycoproteins of other viruses to target a broad range of cell types.

[0847] Lentiviruses can be prepared as follows. After cloning pCasES10 (which contains a lentiviral transfer plasmid backbone), HEK293FT at low passage (p=5) were seeded in a T-75 flask to 50% confluence the day before transfection in DMEM with 10% fetal bovine serum and without antibiotics. After 20 hours, media is changed to OptiMEM (serum-free) media and transfection was done 4 hours later. Cells are transfected with 10 μg of lentiviral transfer plasmid (pCasES10) and the following packaging plasmids: 5 μg of pMD2.G (VSV-g pseudotype), and 7.5 μg of psPAX2 (gag/pol/rev/tat). Transfection can be done in 4 mL OptiMEM with a cationic lipid delivery agent (50 μl Lipofectamine 2000 and 100 ul Plus reagent). After 6 hours, the media is changed to antibiotic-free DMEM with 10% fetal bovine serum. These methods use serum during cell culture, but serum-free methods are preferred.

[0848] Lentivirus can be purified as follows. Viral supernatants are harvested after 48 hours. Supernatants are first cleared of debris and filtered through a 0.45 μm low protein binding (PVDF) filter. They are then spun in an ultracentrifuge for 2 hours at 24,000 rpm. Viral pellets are resuspended in 50 μl of DMEM overnight at 4° C. They are then aliquoted and immediately frozen at −80° C.

[0849] In another embodiment, minimal non-primate lentiviral vectors based on the equine infectious anemia virus (EIAV) are also contemplated. In another embodiment, RetinoStat®, an equine infectious anemia virus-based lentiviral gene therapy vector that expresses angiostatic proteins endostatin and angiostatin that is contemplated to be delivered via a subretinal injection. In another embodiment, use of a self-inactivating lentiviral vector is contemplated.

[0850] Any RNA of the systems, for example a guide RNA or a base editor-encoding mRNA, can be delivered in the form of RNA. Base editor-encoding mRNA can be generated using in vitro transcription. For example, nuclease mRNA can be synthesized using a PCR cassette containing the following elements: T7 promoter, optional kozak sequence (GCCACC), nuclease sequence, and 3′ UTR such as a 3′ UTR from beta globin-polyA tail. The cassette can be used for transcription by T7 polymerase. Guide polynucleotides (e.g., gRNA) can also be transcribed using in vitro transcription from a cassette containing a T7 promoter, followed by the sequence “GG”, and guide polynucleotide sequence.

[0851] To enhance expression and reduce possible toxicity, the base editor-coding sequence and/or the guide nucleic acid can be modified to include one or more modified nucleoside e.g. using pseudo-U or 5-Methyl-C.

[0852] The small packaging capacity of AAV vectors makes the delivery of a number of genes that exceed this size and/or the use of large physiological regulatory elements challenging. These challenges can be addressed, for example, by dividing the protein(s) to be delivered into two or more fragments, wherein the N-terminal fragment is fused to a split intein-N and the C-terminal fragment is fused to a split intein-C. These fragments are then packaged into two or more AAV vectors. As used herein, “intein” refers to a self-splicing protein intron (e.g., peptide) that ligates flanking N-terminal and C-terminal exteins (e.g., fragments to be joined). The use of certain inteins for joining heterologous protein fragments is described, for example, in Wood et al., J. Biol. Chem. 289(21); 14512-9 (2014). For example, when fused to separate protein fragments, the inteins IntN and IntC recognize each other, splice themselves out and simultaneously ligate the flanking N- and C-terminal exteins of the protein fragments to which they were fused, thereby reconstituting a full-length protein from the two protein fragments. Other suitable inteins will be apparent to a person of skill in the art.

[0853] A fragment of a fusion protein of the invention can vary in length. In some embodiments, a protein fragment ranges from 2 amino acids to about 1000 amino acids in length. In some embodiments, a protein fragment ranges from about 5 amino acids to about 500 amino acids in length. In some embodiments, a protein fragment ranges from about 20 amino acids to about 200 amino acids in length. In some embodiments, a protein fragment ranges from about 10 amino acids to about 100 amino acids in length. Suitable protein fragments of other lengths will be apparent to a person of skill in the art.

[0854] In one embodiment, dual AAV vectors are generated by splitting a large transgene expression cassette in two separate halves (5′ and 3′ ends, or head and tail), where each half of the cassette is packaged in a single AAV vector (of <5 kb). The re-assembly of the full-length transgene expression cassette is then achieved upon co-infection of the same cell by both dual AAV vectors followed by: (1) homologous recombination (HR) between 5′ and 3′ genomes (dual AAV overlapping vectors); (2) ITR-mediated tail-to-head concatemerization of 5′ and 3′ genomes (dual AAV trans-splicing vectors); or (3) a combination of these two mechanisms (dual AAV hybrid vectors). The use of dual AAV vectors in vivo results in the expression of full-length proteins. The use of the dual AAV vector platform represents an efficient and viable gene transfer strategy for transgenes of >4.7 kb in size.

### Inteins

[0855] In some embodiments, a portion or fragment of a nuclease (e.g., Cas9) is fused to an intein. The nuclease can be fused to the N-terminus or the C-terminus of the intein. In some embodiments, a portion or fragment of a fusion protein is fused to an intein and fused to an AAV capsid protein. The intein, nuclease and capsid protein can be fused together in any arrangement (e.g., nuclease-intein-capsid, intein-nuclease-capsid, capsid-intein-nuclease, etc.). In some embodiments, the N-terminus of an intein is fused to the C-terminus of a fusion protein and the C-terminus of the intein is fused to the N-terminus of an AAV capsid protein.

[0856] Inteins (intervening protein) are auto-processing domains found in a variety of diverse organisms, which carry out a process known as protein splicing. Protein splicing is a multi-step biochemical reaction comprised of both the cleavage and formation of peptide bonds. While the endogenous substrates of protein splicing are proteins found in intein-containing organisms, inteins can also be used to chemically manipulate virtually any polypeptide backbone.

[0857] In protein splicing, the intein excises itself out of a precursor polypeptide by cleaving two peptide bonds, thereby ligating the flanking extein (external protein) sequences via the formation of a new peptide bond. This rearrangement occurs post-translationally (or possibly co-translationally). Intein-mediated protein splicing occurs spontaneously, requiring only the folding of the intein domain.

[0858] About 5% of inteins are split inteins, which are transcribed and translated as two separate polypeptides, the N-intein and C-intein, each fused to one extein. Upon translation, the intein fragments spontaneously and non-covalently assemble into the canonical intein structure to carry out protein splicing in trans. The mechanism of protein splicing entails a series of acyl-transfer reactions that result in the cleavage of two peptide bonds at the intein-extein junctions and the formation of a new peptide bond between the N- and C-exteins. This process is initiated by activation of the peptide bond joining the N-extein and the N-terminus of the intein. Virtually all inteins have a cysteine or serine at their N-terminus that attacks the carbonyl carbon of the C-terminal N-extein residue. This N to O/S acyl-shift is facilitated by a conserved threonine and histidine (referred to as the TXXH motif), along with a commonly found aspartate, which results in the formation of a linear (thio)ester intermediate. Next, this intermediate is subject to trans-(thio)esterification by nucleophilic attack of the first C-extein residue (+1), which is a cysteine, serine, or threonine. The resulting branched (thio)ester intermediate is resolved through a unique transformation: cyclization of the highly conserved C-terminal asparagine of the intein. This process is facilitated by the histidine (found in a highly conserved HNF motif) and the penultimate histidine and may also involve the aspartate. This succinimide formation reaction excises the intein from the reactive complex and leaves behind the exteins attached through a non-peptidic linkage. This structure rapidly rearranges into a stable peptide bond in an intein-independent fashion.

[0859] In some embodiments, an N-terminal fragment of a base editor (e.g., ABE, CBE) is fused to a split intein-N and a C-terminal fragment is fused to a split intein-C. These fragments are then packaged into two or more AAV vectors. The use of certain inteins for joining heterologous protein fragments is described, for example, in Wood et al., J. Biol. Chem. 289(21); 14512-9 (2014). For example, when fused to separate protein fragments, the inteins IntN and IntC recognize each other, splice themselves out and simultaneously ligate the flanking N- and C-terminal exteins of the protein fragments to which they were fused, thereby reconstituting a full-length protein from the two protein fragments. Other suitable inteins will be apparent to a person of skill in the art.

[0860] In some embodiments, an ABE was split into N- and C-terminal fragments at Ala, Ser, Thr, or Cys residues within selected regions of SpCas9. These regions correspond to loop regions identified by Cas9 crystal structure analysis. The N-terminus of each fragment is fused to an intein-N and the C-terminus of each fragment is fused to an intein C at amino acid positions S303, T310, T313, S355, A456, S460, A463, T466, S469, T472, T474, C574, S577, A589, and S590, which are indicated in Bold Capitals in the sequence below.

| (SEQ ID NO: 1) | |
|---|---|
| 1 | mdkkysigld igtnsvgwav itdeykvpsk kfkvlgntdr hsikknliga llfdsgetae |
| 61 | atrlkrtarr rytrrknric ylqeifsnem akvddsffhr leesflveed kkherhpifg |
| 121 | nivdevayhe kyptiyhlrk klvdstdkad lrliylalah mikfrghfli egdlnpdnsd |
| 181 | vdklfiqlvq tynqlfeenp inasgvdaka ilsarlsksr rlenliaqlp gekknglfgn |
| 241 | lialslgltp nfksnfdlae daklqlskdt ydddldnlla qigdqyadlf laaknlsdai |
| 301 | llSdilrvnT eiTkaplsas mikrydehhq dltllkalvr qqlpekykei ffdqSkngya |
| 361 | gyidggasqe efykfikpil ekmdgteell vklnredllr kqrtfdngsi phqihlgelh |
| 421 | ailrrqedfy pflkdnreki ekiltfripy yvgplArgnS rfAwmTrkSe eTiTpwnfee |
| 481 | vvdkgasaqs fiermtnfdk nlpnekvlpk hsllyeyftv yneltkvkyv tegmrkpafl |
| 541 | sgeqkkaivd llfktnrkvt vkqlkedyfk kieCfdSvei sgvedrfnAS lgtyhdllki |
| 601 | ikdkdfldne enedilediv ltltlfedre mieerlktya hlfddkvmkq lkrrrytgwg |
| 661 | rlsrklingi rdkqsgktil dflksdgfan rnfmqlihdd sltfkediqk aqvsgqgdsl |
| 721 | hehianlags paikkgilqt vkvvdelvkv mgrhkpeniv iemarenqtt qkgqknsrer |
| 781 | mkrieegike lgsqilkehp ventqlqnek lylyylqngr dmyvdqeldi nrlsdydvdh |
| 841 | ivpqsflkdd sidnkvltrs dknrgksdnv pseevvkkmk nywrqllnak litqrkfdnl |
| 901 | tkaergglse ldkagfikrq lvetrqitkh vaqildsrmn tkydendkli revkvitlks |
| 961 | klvsdfrkdf qfykvreinn yhhahdayln avvgtalikk ypklesefvy gdykvydvrk |
| 1021 | miakseqeig katakyffys nimnffktei tlangeirkr plietngetg eivwdkgrdf |
| 1081 | atvrkvlsmp qvnivkktev qtggfskesi lpkrnsdkli arkkdwdpkk yggfdsptva |
| 1141 | ysvlvvakve kgkskklksv kellgitime rssfeknpid fleakgykev kkdliiklpk |
| 1201 | yslfelengr krmlasagel qkgnelalps kyvnflylas hyeklkgspe dneqkqlfve |
| 1261 | qhkhyldeii eqisefskrv iladanldkv lsaynkhrdk pireqaenii hlftltnlga |
| 1321 | paafkyfdtt idrkrytstk evldatlihq sitglyetri dlsqlggd |

### Use of Nucleobase Editors to Target Mutations

[0861] The suitability of nucleobase editors that targets a mutation is evaluated as described herein. In one embodiment, a single cell of interest is transduced with a base editing system together with a small amount of a vector encoding a reporter (e.g., GFP). These cells can be any cell line known in the art, including immortalized human cell lines, such as 293T, K562 or U20S. Alternatively, primary cells (e.g., human) may be used. Such cells may be relevant to the eventual cell target.

[0862] Delivery may be performed using a viral vector. In one embodiment, transfection may be performed using lipid transfection (such as Lipofectamine or Fugene) or by electroporation. Following transfection, expression of GFP can be determined either by fluorescence microscopy or by flow cytometry to confirm consistent and high levels of transfection. These preliminary transfections can comprise different nucleobase editors to determine which combinations of editors give the greatest activity.

[0863] The activity of the nucleobase editor is assessed as described herein, i.e., by sequencing the genome of the cells to detect alterations in a target sequence. For Sanger sequencing, purified PCR amplicons are cloned into a plasmid backbone, transformed, miniprepped and sequenced with a single primer. Sequencing may also be performed using next generation sequencing techniques. When using next generation sequencing, amplicons may be 300-500 bp with the intended cut site placed asymmetrically. Following PCR, next generation sequencing adapters and barcodes (for example Illumina multiplex adapters and indexes) may be added to the ends of the amplicon, e.g., for use in high throughput sequencing (for example on an Illumina MiSeq).

[0864] The fusion proteins that induce the greatest levels of target specific alterations in initial tests can be selected for further evaluation.

[0865] In particular embodiments, the nucleobase editors are used to target polynucleotides of interest. In one embodiment, a nucleobase editor of the invention is delivered to cells (e.g., hematopoietic cells or their progenitors, hematopoietic stem cells, and/or induced pluripotent stem cells) in conjunction with a guide RNA that is used to target a mutation of interest within the genome of a cell, thereby altering the mutation. In some embodiments, a base editor is targeted by a guide RNA to introduce one or more edits to the sequence of a gene of interest.

[0866] In one embodiment, a nucleobase editor is used to target a regulatory sequence, including but not limited to splice sites, enhancers, and transcriptional regulatory elements. The effect of the alteration on the expression of a gene controlled by the regulatory element is then assayed using any method known in the art.

[0867] In still other embodiments, a nucleobase editor of the invention is used to target polynucleotides of interest within the genome of an organism. In one embodiment, a nucleobase editor of the invention is delivered to cells in conjunction with a library of guide RNAs that are used to tile a variety of sequences within the genome of a cell, thereby systematically altering sequences throughout the genome.

[0868] The system can comprise one or more different vectors. In an aspect, the base editor is codon optimized for expression the desired cell type, preferentially a eukaryotic cell, preferably a mammalian cell or a human cell.

[0869] In general, codon optimization refers to a process of modifying a nucleic acid sequence for enhanced expression in the host cells of interest by replacing at least one codon (e.g. about or more than about 1, 2, 3, 4, 5, 10, 15, 20, 25, 50, or more codons) of the native sequence with codons that are more frequently or most frequently used in the genes of that host cell while maintaining the native amino acid sequence. Various species exhibit particular bias for certain codons of a particular amino acid. Codon bias (differences in codon usage between organisms) often correlates with the efficiency of translation of messenger RNA (mRNA), which is in turn believed to be dependent on, among other things, the properties of the codons being translated and the availability of particular transfer RNA (tRNA) molecules. The predominance of selected tRNAs in a cell is generally a reflection of the codons used most frequently in peptide synthesis. Accordingly, genes can be tailored for optimal gene expression in a given organism based on codon optimization. Codon usage tables are readily available, for example, at the “Codon Usage Database” available at www.kazusa.orjp/codon/(visited Jul. 9, 2002), and these tables can be adapted in a number of ways. See, Nakamura, Y., et al. “Codon usage tabulated from the international DNA sequence databases: status for the year 2000” Nucl. Acids Res. 28:292 (2000). Computer algorithms for codon optimizing a particular sequence for expression in a particular host cell are also available, such as Gene Forge (Aptagen; Jacobus, Pa.), are also available. In some embodiments, one or more codons (e.g. 1, 2, 3, 4, 5, 10, 15, 20, 25, 50, or more, or all codons) in a sequence encoding an engineered nuclease correspond to the most frequently used codon for a particular amino acid.

[0870] Packaging cells are typically used to form virus particles that are capable of infecting a host cell. Such cells include 293 cells, which package adenovirus, and psi.2 cells or PA317 cells, which package retrovirus. Viral vectors used in gene therapy are usually generated by producing a cell line that packages a nucleic acid vector into a viral particle. The vectors typically contain the minimal viral sequences required for packaging and subsequent integration into a host, other viral sequences being replaced by an expression cassette for the polynucleotide(s) to be expressed. The missing viral functions are typically supplied in trans by the packaging cell line. For example, AAV vectors used in gene therapy typically only possess ITR sequences from the AAV genome which are required for packaging and integration into the host genome. Viral DNA can be packaged in a cell line, which contains a helper plasmid encoding the other AAV genes, namely rep and cap, but lacking ITR sequences. The cell line can also be infected with adenovirus as a helper. The helper virus can promote replication of the AAV vector and expression of AAV genes from the helper plasmid. The helper plasmid in some cases is not packaged in significant amounts due to a lack of ITR sequences. Contamination with adenovirus can be reduced by, e.g., heat treatment to which adenovirus is more sensitive than AAV.

### Applications for Multi-Effector Nucleobase Editors

[0871] The multi-effector nucleobase editors can be used to target polynucleotides of interest to create alterations that modify protein expression. In one embodiment, a multi-effector nucleobase editor is used to modify a non-coding or regulatory sequence, including but not limited to splice sites, enhancers, and transcriptional regulatory elements. The effect of the alteration on the expression of a gene controlled by the regulatory element is then assayed using any method known in the art. In a particular embodiment, a multi-effector nucleobase editor is able to substantially alter a regulatory sequence, thereby abolishing its ability to regulate gene expression. Advantageously, this can be done without generating double-stranded breaks in the genomic target sequence, in contrast to other RNA-programmable nucleases.

[0872] The multi-effector nucleobase editors can be used to target polynucleotides of interest to create alterations that modify protein activity. In the context of mutagenesis, for example, multi-effector nucleobase editors have a number of advantages over error-prone PCR and other polymerase-based methods. Because multi-effector nucleobase editors of the invention create alterations at multiple bases in a target region, such mutations are more likely to be expressed at the protein level relative to mutations introduced by error-prone PCR, which are less likely to be expressed at the protein level given that a single nucleotide change in a codon may still encode the same amino acid (e.g., codon degeneracy). Unlike error-prone PCR, which induces random alterations throughout a polynucleotide, multi-effector nucleobase editors of the invention can be used to target specific amino acids within a small or defined region of a protein of interest.

[0873] In other embodiments, a multi-effector nucleobase editor of the invention is used to target a polynucleotide of interest within the genome of an organism. In one embodiment, the organism is a bacteria of the microbiome (e.g., Bacteriodetes, Verrucomicrobia, Firmicutes; Gammaproteobacteria, Alphaproteobacteria, Bacteriodetes, Clostridia, Erysipelotrichia, Bacilli; Enterobacteriales, Bacteriodales, Verrucomicrobiales, Clostridiales, Erysiopelotrichales, Lactobacillales; Enterobacteriaceae, Bacteroidaceae, Erysiopelotrichaceae, Prevotellaceae, Coriobacteriaceae, and Alcaligenaceae, Escherichia, Bacteroides, Alistipes, Akkermansia, Clostridium, Lactobacillus). In another embodiment, the organism is an agriculturally important animal (e.g., cow, sheep, goat, horse, chicken, turkey) or plant (e.g., soybeans, wheat, corn, rice, tobacco, apples, grapes, peaches, plums, cherries). In one embodiment, a multi-effector nucleobase editor of the invention is delivered to cells in conjunction with a library of guide RNAs that are used to tile a variety of sequences within the genome of a cell, thereby systematically altering sequences throughout the genome.

[0874] Mutations may be made in any of a variety of proteins to facilitate structure function analysis or to alter the endogenous activity of the protein. Mutations may be made, for example, in an enzyme (e.g., kinase, phosphatase, carboxylase, phosphodiesterase) or in an enzyme substrate, in a receptor or in its ligand, and in an antibody and its antigen. In one embodiment, a multi-effector nucleobase editor targets a nucleic acid molecule encoding the active site of the enzyme, the ligand binding site of a receptor, or a complementarity determining region (CDR) of an antibody. In the case of an enzyme, inducing mutations in the active site could increase, decrease, or abolish the enzyme's activity. The effect of mutations on the enzyme is characterized in an enzyme activity assay, including any of a number of assays known in the art and/or that would be apparent to the skilled artisan. In the case of a receptor, mutations made at the ligand binding site could increase, decrease or abolish the receptors affinity for its ligand. The effect of such mutations is assayed in a receptor/ligand binding assay, including any of a number of assays known in the art and/or that would be apparent to the skilled artisan.

### Pharmaceutical Compositions

[0875] Other aspects of the present disclosure relate to pharmaceutical compositions comprising any of the base editors, fusion proteins, or the fusion protein-guide polynucleotide complexes described herein. In some embodiments, the pharmaceutical composition further comprises a pharmaceutically acceptable carrier. In some embodiments, the pharmaceutical composition comprises additional agents (e.g., for specific delivery, increasing half-life, or other therapeutic compounds).

[0876] Suitable pharmaceutically acceptable carriers generally comprise inert substances that aid in administering the pharmaceutical composition to a subject, aid in processing the pharmaceutical compositions into deliverable preparations, or aid in storing the pharmaceutical composition prior to administration. Pharmaceutically acceptable carriers can include agents that can stabilize, optimize or otherwise alter the form, consistency, viscosity, pH, pharmacokinetics, solubility of the formulation.

[0877] Some nonlimiting examples of materials which can serve as pharmaceutically-acceptable carriers include: (1) sugars, such as lactose, glucose and sucrose; (2) starches, such as corn starch and potato starch; (3) cellulose, and its derivatives, such as sodium carboxymethyl cellulose, methylcellulose, ethyl cellulose, microcrystalline cellulose and cellulose acetate; (4) powdered tragacanth; (5) malt; (6) gelatin; (7) lubricating agents, such as magnesium stearate, sodium lauryl sulfate and talc; (8) excipients, such as cocoa butter and suppository waxes; (9) oils, such as peanut oil, cottonseed oil, safflower oil, sesame oil, olive oil, corn oil and soybean oil; (10) glycols, such as propylene glycol; (11) polyols, such as glycerin, sorbitol, mannitol and polyethylene glycol (PEG); (12) esters, such as ethyl oleate and ethyl laurate; (13) agar; (14) buffering agents, such as magnesium hydroxide and aluminum hydroxide; (15) alginic acid; (16) pyrogen-free water; (17) isotonic saline; (18) Ringer's solution; (19) ethyl alcohol; (20) pH buffered solutions; (21) polyesters, polycarbonates and/or polyanhydrides; (22) bulking agents, such as polypeptides and amino acids (23) serum alcohols, such as ethanol; and (23) other non-toxic compatible substances employed in pharmaceutical formulations. Buffering agents, wetting agents, emulsifying agents, diluents, encapsulating agents, skin penetration enhancers, coloring agents, release agents, coating agents, sweetening agents, flavoring agents, perfuming agents, preservative and antioxidants can also be present in the formulation. For example, carriers can include, but are not limited to, saline, buffered saline, dextrose, arginine, sucrose, water, glycerol, ethanol, sorbitol, dextran, sodium carboxymethyl cellulose, and combinations thereof.

[0878] Pharmaceutical compositions can comprise one or more pH buffering compounds to maintain the pH of the formulation at a predetermined level that reflects physiological pH, such as in the range of about 5.0 to about 8.0. The pH buffering compound used in the aqueous liquid formulation can be an amino acid or mixture of amino acids, such as histidine or a mixture of amino acids such as histidine and glycine. Alternatively, the pH buffering compound is preferably an agent which maintains the pH of the formulation at a predetermined level, such as in the range of about 5.0 to about 8.0, and which does not chelate calcium ions. Illustrative examples of such pH buffering compounds include, but are not limited to, imidazole and acetate ions. The pH buffering compound may be present in any amount suitable to maintain the pH of the formulation at a predetermined level.

[0879] Pharmaceutical compositions can also contain one or more osmotic modulating agents, i.e., a compound that modulates the osmotic properties (e.g., tonicity, osmolality, and/or osmotic pressure) of the formulation to a level that is acceptable to the blood stream and blood cells of recipient individuals. The osmotic modulating agent can be an agent that does not chelate calcium ions. The osmotic modulating agent can be any compound known or available to those skilled in the art that modulates the osmotic properties of the formulation. One skilled in the art may empirically determine the suitability of a given osmotic modulating agent for use in the inventive formulation. Illustrative examples of suitable types of osmotic modulating agents include, but are not limited to: salts, such as sodium chloride and sodium acetate; sugars, such as sucrose, dextrose, and mannitol; amino acids, such as glycine; and mixtures of one or more of these agents and/or types of agents. The osmotic modulating agent(s) may be present in any concentration sufficient to modulate the osmotic properties of the formulation.

[0880] In some embodiments, the pharmaceutical composition is formulated for delivery to a subject, e.g., for gene editing. In some embodiments, administration of the pharmaceutical compositions contemplated herein may be carried out using conventional techniques including, but not limited to, infusion, transfusion, or parenterally. In some embodiments, parenteral administration includes infusing or injecting intravascularly, intravenously, intramuscularly, intraarterially, intrathecally, intratumorally, intradermally, intraperitoneally, transtracheally, subcutaneously, subcuticularly, intraarticularly, subcapsularly, subarachnoidly and intrasternally. In some embodiments, suitable routes of administrating the pharmaceutical composition described herein include, without limitation: topical, subcutaneous, transdermal, intradermal, intralesional, intraarticular, intraperitoneal, intravesical, transmucosal, gingival, intradental, intracochlear, transtympanic, intraorgan, epidural, intrathecal, intramuscular, intravenous, intravascular, intraosseus, periocular, intratumoral, intracerebral, and intracerebroventricular administration.

[0881] In some embodiments, the pharmaceutical composition described herein is administered locally to a diseased site (e.g., tumor site). In some embodiments, the pharmaceutical composition described herein is administered to a subject by injection, by means of a catheter, by means of a suppository, or by means of an implant, the implant being of a porous, non-porous, or gelatinous material, including a membrane, such as a sialastic membrane, or a fiber.

[0882] In other embodiments, the pharmaceutical composition described herein is delivered in a controlled release system. In one embodiment, a pump can be used (see, e.g., Langer, 1990, Science 249: 1527-1533; Sefton, 1989, CRC Crit. Ref. Biomed. Eng. 14:201; Buchwald et al., 1980, Surgery 88:507; Saudek et al, 1989, N. Engl. J. Med. 321:574). In another embodiment, polymeric materials can be used. (See, e.g., Medical Applications of Controlled Release (Langer and Wise eds., CRC Press, Boca Raton, Fla., 1974); Controlled Drug Bioavailability, Drug Product Design and Performance (Smolen and Ball eds., Wiley, New York, 1984); Ranger and Peppas, 1983, Macromol. Sci. Rev. Macromol. Chem. 23:61. See also Levy et al., 1985, Science 228: 190; During et al., 1989, Ann. Neurol. 25:351; Howard et ah, 1989, J. Neurosurg. 71: 105.) Other controlled release systems are discussed, for example, in Langer, supra.

[0883] In some embodiments, the pharmaceutical composition is formulated in accordance with routine procedures as a composition adapted for intravenous or subcutaneous administration to a subject, e.g., a human. In some embodiments, pharmaceutical composition for administration by injection are solutions in sterile isotonic use as solubilizing agent and a local anesthetic such as lignocaine to ease pain at the site of the injection. Generally, the ingredients are supplied either separately or mixed together in unit dosage form, for example, as a dry lyophilized powder or water free concentrate in a hermetically sealed container such as an ampoule or sachette indicating the quantity of active agent. Where the pharmaceutical is to be administered by infusion, it can be dispensed with an infusion bottle containing sterile pharmaceutical grade water or saline. Where the pharmaceutical composition is administered by injection, an ampoule of sterile water for injection or saline can be provided so that the ingredients can be mixed prior to administration.

[0884] A pharmaceutical composition for systemic administration can be a liquid, e.g., sterile saline, lactated Ringer's or Hank's solution. In addition, the pharmaceutical composition can be in solid forms and re-dissolved or suspended immediately prior to use. Lyophilized forms are also contemplated. The pharmaceutical composition can be contained within a lipid particle or vesicle, such as a liposome or microcrystal, which is also suitable for parenteral administration. The particles can be of any suitable structure, such as unilamellar or plurilamellar, so long as compositions are contained therein. Compounds can be entrapped in “stabilized plasmid-lipid particles” (SPLP) containing the fusogenic lipid dioleoylphosphatidylethanolamine (DOPE), low levels (5-10 mol %) of cationic lipid, and stabilized by a polyethyleneglycol (PEG) coating (Zhang Y. P. et ah, Gene Ther. 1999, 6: 1438-47). Positively charged lipids such as N-[1-(2,3-dioleoyloxi)propyl]-N,N,N-trimethyl-amoniummethylsulfate, or “DOTAP,” are particularly preferred for such particles and vesicles. The preparation of such lipid particles is well known. See, e.g., U.S. Pat. Nos. 4,880,635; 4,906,477; 4,911,928; 4,917,951; 4,920,016; and 4,921,757; each of which is incorporated herein by reference.

[0885] The pharmaceutical composition described herein can be administered or packaged as a unit dose, for example. The term “unit dose” when used in reference to a pharmaceutical composition of the present disclosure refers to physically discrete units suitable as unitary dosage for the subject, each unit containing a predetermined quantity of active material calculated to produce the desired therapeutic effect in association with the required diluent; i.e., carrier, or vehicle.

[0886] Further, the pharmaceutical composition can be provided as a pharmaceutical kit comprising (a) a container containing a compound of the invention in lyophilized form and (b) a second container containing a pharmaceutically acceptable diluent (e.g., sterile used for reconstitution or dilution of the lyophilized compound of the invention. Optionally associated with such container(s) can be a notice in the form prescribed by a governmental agency regulating the manufacture, use or sale of pharmaceuticals or biological products, which notice reflects approval by the agency of manufacture, use or sale for human administration.

[0887] In another aspect, an article of manufacture containing materials useful for the treatment of the diseases described above is included. In some embodiments, the article of manufacture comprises a container and a label. Suitable containers include, for example, bottles, vials, syringes, and test tubes. The containers can be formed from a variety of materials such as glass or plastic. In some embodiments, the container holds a composition that is effective for treating a disease described herein and can have a sterile access port. For example, the container can be an intravenous solution bag or a vial having a stopper pierceable by a hypodermic injection needle. The active agent in the composition is a compound of the invention. In some embodiments, the label on or associated with the container indicates that the composition is used for treating the disease of choice. The article of manufacture can further comprise a second container comprising a pharmaceutically-acceptable buffer, such as phosphate-buffered saline, Ringer's solution, or dextrose solution. It can further include other materials desirable from a commercial and user standpoint, including other buffers, diluents, filters, needles, syringes, and package inserts with instructions for use.

[0888] In some embodiments, any of the fusion proteins, gRNAs, and/or complexes described herein are provided as part of a pharmaceutical composition. In some embodiments, the pharmaceutical composition comprises any of the fusion proteins provided herein. In some embodiments, the pharmaceutical composition comprises any of the complexes provided herein. In some embodiments, the pharmaceutical composition comprises a ribonucleoprotein complex comprising an RNA-guided nuclease (e.g., Cas9) that forms a complex with a gRNA and a cationic lipid. In some embodiments pharmaceutical composition comprises a gRNA, a nucleic acid programmable DNA binding protein, a cationic lipid, and a pharmaceutically acceptable excipient. Pharmaceutical compositions can optionally comprise one or more additional therapeutically active substances.

[0889] In some embodiments, compositions provided herein are administered to a subject, for example, to a human subject, in order to effect a targeted genomic modification within the subject. In some embodiments, cells are obtained from the subject and contacted with any of the pharmaceutical compositions provided herein. In some embodiments, cells removed from a subject and contacted ex vivo with a pharmaceutical composition are re-introduced into the subject, optionally after the desired genomic modification has been effected or detected in the cells. Methods of delivering pharmaceutical compositions comprising nucleases are known, and are described, for example, in U.S. Pat. Nos. 6,453,242; 6,503,717; 6,534,261; 6,599,692; 6,607,882; 6,689,558; 6,824,978; 6,933,113; 6,979,539; 7,013,219; and 7,163,824, the disclosures of which are incorporated by reference herein in their entireties. Although the descriptions of pharmaceutical compositions provided herein are principally directed to pharmaceutical compositions which are suitable for administration to humans, it will be understood by the skilled artisan that such compositions are generally suitable for administration to animals or organisms of all sorts, for example, for veterinary use.

[0890] Modification of pharmaceutical compositions suitable for administration to humans in order to render the compositions suitable for administration to various animals is well understood, and the ordinarily skilled veterinary pharmacologist can design and/or perform such modification with merely ordinary, if any, experimentation. Subjects to which administration of the pharmaceutical compositions is contemplated include, but are not limited to, humans and/or other primates; mammals, domesticated animals, pets, and commercially relevant mammals such as cattle, pigs, horses, sheep, cats, dogs, mice, and/or rats; and/or birds, including commercially relevant birds such as chickens, ducks, geese, and/or turkeys.

[0891] Formulations of the pharmaceutical compositions described herein can be prepared by any method known or hereafter developed in the art of pharmacology. In general, such preparatory methods include the step of bringing the active ingredient(s) into association with an excipient and/or one or more other accessory ingredients, and then, if necessary and/or desirable, shaping and/or packaging the product into a desired single- or multi-dose unit. Pharmaceutical formulations can additionally comprise a pharmaceutically acceptable excipient, which, as used herein, includes any and all solvents, dispersion media, diluents, or other liquid vehicles, dispersion or suspension aids, surface active agents, isotonic agents, thickening or emulsifying agents, preservatives, solid binders, lubricants and the like, as suited to the particular dosage form desired. Remington's The Science and Practice of Pharmacy, 21st Edition, A. R. Gennaro (Lippincott, Williams & Wilkins, Baltimore, Md., 2006; incorporated in its entirety herein by reference) discloses various excipients used in formulating pharmaceutical compositions and known techniques for the preparation thereof. See also PCT application PCT/US2010/055131 (Publication number WO2011/053982 A8, filed Nov. 2, 2010), incorporated in its entirety herein by reference, for additional suitable methods, reagents, excipients and solvents for producing pharmaceutical compositions comprising a nuclease.

[0892] Except insofar as any conventional excipient medium is incompatible with a substance or its derivatives, such as by producing any undesirable biological effect or otherwise interacting in a deleterious manner with any other component(s) of the pharmaceutical composition, its use is contemplated to be within the scope of this disclosure.

[0893] The compositions, as described above, can be administered in effective amounts. The effective amount will depend upon the mode of administration, the particular condition being treated, and the desired outcome. It may also depend upon the stage of the condition, the age and physical condition of the subject, the nature of concurrent therapy, if any, and like factors well-known to the medical practitioner. For therapeutic applications, it is that amount sufficient to achieve a medically desirable result.

[0894] In some embodiments, compositions in accordance with the present disclosure can be used for treatment of any of a variety of diseases, disorders, and/or conditions.

### Methods of Treatment

[0895] Provided also are methods of treating a disease or condition and/or the genetic mutations that cause the disease or condition. These methods comprise administering to a subject (e.g., a mammal, such as a human) a therapeutically effective amount of a pharmaceutical composition that comprises a polynucleotide encoding a base editor system (e.g., base editor and gRNA) described herein. In some embodiments, the base editor is a fusion protein that comprises a napDNAbp domain and an adenosine deaminase domain or a cytidine deaminase domain. A cell of the subject is transduced with the base editor and one or more guide polynucleotides that target the base editor to effect an A•T to G•C alteration (if the cell is transduced with an adenosine deaminase domain) or a C•G to U•A alteration (if the cell is transduced with a cytidine deaminase domain) of a nucleic acid sequence containing mutations in a gene of interest.

[0896] The methods herein include administering to the subject (including a subject identified as being in need of such treatment, or a subject suspected of being at risk of disease and in need of such treatment) an effective amount of a composition described herein. Identifying a subject in need of such treatment can be in the judgment of a subject or a health care professional and can be subjective (e.g., opinion) or objective (e.g., measurable by a test or diagnostic method).

[0897] The therapeutic methods, in general, comprise administration of a therapeutically effective amount of a pharmaceutical composition comprising, for example, a vector encoding a base editor and a gRNA that targets the gene of interest of a subject (e.g., a human patient) in need thereof. Such treatment will be suitably administered to a subject, particularly a human subject, suffering from, having, susceptible to, or at risk for the disease or condition.

[0898] In one embodiment, the invention provides a method of monitoring treatment progress is provided. The method includes the step of determining a level of diagnostic marker (Marker) (e.g., SNP associated with the disease or condition) or diagnostic measurement (e.g., screen, assay) in a subject suffering from or susceptible to a disease, disorder, or symptoms thereof in which the subject has been administered a therapeutic amount of a composition herein sufficient to treat the disease or symptoms thereof. The level of Marker determined in the method can be compared to known levels of Marker in either healthy normal controls or in other afflicted patients to establish the subject's disease status. In preferred embodiments, a second level of Marker in the subject is determined at a time point later than the determination of the first level, and the two levels are compared to monitor the course of disease or the efficacy of the therapy. In certain preferred embodiments, a pre-treatment level of Marker in the subject is determined prior to beginning treatment according to this invention; this pre-treatment level of Marker can then be compared to the level of Marker in the subject after the treatment commences, to determine the efficacy of the treatment.

[0899] In some embodiments, cells are obtained from the subject and contacted with a pharmaceutical composition as provided herein. In some embodiments, cells removed from a subject and contacted ex vivo with a pharmaceutical composition are re-introduced into the subject, optionally after the desired genomic modification has been effected or detected in the cells. Methods of delivering pharmaceutical compositions comprising nucleases are described, for example, in U.S. Pat. Nos. 6,453,242; 6,503,717; 6,534,261; 6,599,692; 6,607,882; 6,689,558; 6,824,978; 6,933,113; 6,979,539; 7,013,219; and 7,163,824, the disclosures of all of which are incorporated by reference herein in their entireties. Although the descriptions of pharmaceutical compositions provided herein are principally directed to pharmaceutical compositions that are suitable for administration to humans, it will be understood by the skilled artisan that such compositions are generally suitable for administration to animals or organisms of all sorts, for example, for veterinary use.

[0900] Provided herein are methods of treating a disease or disorder with a composition or system, e.g., a base editor system or a base editor protein, described herein. Optionally, the base editor system described herein can be combined with one or more other treatments. In one aspect, provided herein is a method of treating Stargardt Disease (SD) in a subject in need thereof by administering a base editor described herein. In one aspect, provided herein is a method of treating Parkinson's Disease (PD) in a subject in need thereof by administering a base editor described herein. In one aspect, provided herein is a method of treating Rett Syndrome (RTT) in a subject in need thereof by administering a base editor described herein. In one aspect, provided herein is a method of treating Hurler Syndrome (HS) in a subject in need thereof by administering a base editor described herein.

[0901] The response in individual subjects can be characterized as a complete response, a partial response, or stable disease. In some embodiments, the response is a partial response (PR). In some embodiments, the response is a complete response (CR). In some embodiments, the response results in progression-free survival of the subject (e.g., stable disease).

[0902] In some embodiments, the treatment results in an increased survival time of the human subject as compared to the expected survival time of the human subject if the human subject was not treated with the compound, e.g. the base editor system. In some embodiments increased survival time comprises slower progression of the disease compared to a subject treated with a base editor comprising a ABET base editor, e.g. ABE7.10.

[0903] In some embodiments, the human subject to be treated with the described methods is a child (e.g., 0-18 years of age). In other embodiments, the human subject to be treated with the described methods is an adult (e.g., 18+ years of age).

### Stargardt Disease (SD)

[0904] Stargardt disease (also known as Stargardt macular dystrophy, juvenile macular degeneration, or fundus flavimaculatus) is an inherited disorder of the retina (i.e., the tissue at the back of the eye that senses light). Stargardt disease is one of several genetic disorders that cause macular degeneration. The disease generally causes vision loss during childhood or adolescence; although vision loss may not be noticed until later in adulthood in some cases. It is rare for the disease to progress to complete blindness. Generally, vision loss progresses slowly over time to 20/200 or worse as progressive damage (degeneration) of the macula occurs over time. In one instance, the Stargardt disease to be treated with the methods described herein comprises juvenile Stargardt disease. In another instance, the Stargardt disease to be treated with the methods described herein comprises late onset Stargardt disease. In another instance, the Stargardt disease to be treated with the methods described herein comprises Stargardt-type Dominant macular dystrophy. In another instance, the Stargardt disease to be treated with the methods described herein comprises Dominant Stargardt-like macular dystrophy.

[0905] Progression of symptoms in Stargardt disease may differ for each patient. Patients with an earlier onset of disease generally tend to have more rapid vision loss. Vision loss may decrease slowly at first, then worsen rapidly until it levels off. Most patients with Stargardt disease will end up with 20/200 vision or worse. People with Stargardt disease may also begin to lose some of their peripheral (side) vision as they get older.

[0906] In some embodiments, a pathogenic SNP is associated with Stargardt disease; optionally, the pathogenic SNP is in an ABCA4 gene; and optionally, the pathogenic mutation comprises A1038V, L541P, G1961E, or a combination thereof. In some embodiments, the pathogenic SNP is associated with Pseudoxanthoma elasticum; optionally, the pathogenic SNP is in an ABCC6 gene; and optionally, the pathogenic mutation comprises R1141* (a nonsense mutation) In some embodiments, the pathogenic SNP is associated with medium-chain acyl-CoA dehydrogenase deficiency; optionally, the pathogenic SNP is in an ACADM gene; and optionally, the pathogenic mutation comprises K329E. In some embodiments, the pathogenic SNP is associated with severe combined immunodeficiency; optionally, the pathogenic SNP is in an ADA gene; and optionally, the pathogenic mutation comprises G216R, Q3*, or a combination thereof.

[0907] An exemplary amino acid sequence of the ABCA4 polypeptide is provided below:

>sp|P78363|ABCA4_HUMAN Retinal-specific phospholipid-transporting ATPase
ABCA4 OS = Homo sapiens OX = 9606 GN = ABCA4 PE = 1 SV = 3
(SEQ ID NO: 6)
[sequence omitted]
Guide RNA sequences target ABCA4 gene at sequence
(SEQ ID NO: 291)
GCTGTGTGTCGAAGTTCGCCCTGGAGAGGTG
or
(SEQ ID NO: 292)
GCTGTGTGTCGGAGTTCGCCCTGGAGAGGTG, where the PAM sequence is underlined.
The guide RNA comprises a sequence
(SEQ ID NO: 293)
CACCUCUCCAGGGCGAACUUCGACACACAGC
or
(SEQ ID NO: 294)
CACCUCUCCAGGGCGAACUCCGACACACAGC.

[0908] One or more symptoms of Stargardt disease include, but are not limited to, variable, slow loss of central vision in both eyes' gray, black, or hazy spots in the center of vision; that it takes longer than usual for eyes to adjust when moving from light to dark environments; eyes may be more sensitive to bright light; color blindness later in the disease, accumulation of toxic lipofuscin pigments such as A2E in cells of the retinal pigment epithelium (RPE), photoreceptor death, increased synthesis of 11-cis-retinaldehyde (11cRAL or retinal), increased regeneration of rhodopsin, lipofuscin accumulation, formation of the lipofuscin pigment, retinal degeneration, production of waste products, formation of A2E (and A2E-related molecules), accumulation of A2E (and A2E-related molecules), choroidal neovascularization, chorioretinal atrophy, or a combination thereof. The subject may exhibit an improvement in one or more of the symptoms of Stargardt Disease. In one embodiment, the improvement in one or more of the symptoms is at least 5%. In another embodiment, the improvement in one or more of the symptoms is at least 10%. In another embodiment, the improvement in one or more of the symptoms is at least 15%. In another embodiment, the improvement in one or more of the symptoms is at least 20%. In another embodiment, the improvement in one or more of the symptoms is at least 25%. In another embodiment, the improvement in one or more of the symptoms is at least 30%. In another embodiment, the improvement in one or more of the symptoms is at least 35%. In another embodiment, the improvement in one or more of the symptoms is at least 40%. In another embodiment, the improvement in one or more of the symptoms is at least 50%. In another embodiment, the improvement in one or more of the symptoms is at least 60%. In another embodiment, the improvement in one or more of the symptoms is at least 70%. In another embodiment, the improvement in one or more of the symptoms is at least 75%. In another embodiment, the improvement in one or more of the symptoms is at least 80%. In another embodiment, the improvement in one or more of the symptoms is at least 85%. In another embodiment, the improvement in one or more of the symptoms is at least 90%. In another embodiment, the improvement in one or more of the symptoms is at least 95%.

### Parkinson's Disease (PD)

[0909] Parkinson disease (PD) is the most common movement disorder, affecting over 6 million people worldwide. PD can present with a juvenile or early onset, but it predominantly afflicts individuals over the age of 55 and the incidence of disease sharply rises after the age of 65. The clinical features of PD include bradykinesia, postural instability, resting tremor, and rigidity which are predominantly associated with the progressive loss of dopaminergic neurons in the substantia nigra (SN) pars compacta. It is believed that during normal aging approximately 0.1-0.2% of the dopaminergic neurons in this area are lost per year, but this rate is greatly accelerated in patients with PD and symptoms manifests when ˜70-80% of these neurons have been lost. Another pathological hallmark of PD is the presence of α-synuclein proteiniacous inclusions, known as Lewy bodies (LBs) in the remaining dopaminergic neurons.

[0910] Although the majority of PD cases are idiopathic, ˜10% of cases report with a family history, and a growing number of mutations have been associated with familial and sporadic forms of the disease. The autosomal dominant G2019S mutation in leucine-rich repeat kinase 2 (LRRK2) is the most common known cause of familial and sporadic patients with PD.

[0911] An exemplary amino acid sequence of the LRRK2 polypeptide is provided below:

[0912] >sp|Q5S007|LRRK2_HUMAN Leucine-rich repeat serine/threonine-protein kinase 2 OS═Homo sapiens OX=9606 GN=LRRK2 PE=1 SV=2

[0913] MASGSCQGCEEDEETLKKLIVRLNNVQEGKQIETLVQILEDLLVFTYSERASK LFQGKNIHVPLLIVLDSYMRVASVQQVGWSLLCKLIEVCPGTMQSLMGPQDVGND WEVLGVHQLILKMLTVHNASVNLSVIGLKTLDLLLTSGKITLLILDEESDIFMLIFDA MHSFPANDEVQKLGCKALHVLFERVSEEQLTEFVENKDYMILLSALTNFKDEEEIVL HVLHCLHSLAIPCNNVEVLMSGNVRCYNIVVEAMKAFPMSERIQEVSCCLLHRLTLG NFFNILVLNEVHEFVVKAVQQYPENAALQISALSCLALLTETIFLNQDLEEKNENQEN DDEGEEDKLFWLEACYKALTWHRKNKHVQEAACWALNNLLMYQNSLHEKIGDED GHFPAHREVMLSMLMHSSSKEVFQASANALSTLLEQNVNFRKILLSKGIHLNVLELM QKHIHSPEVAESGCKMLNHLFEGSNTSLDIMAAVVPKILTVMKRHETSLPVQLEALR AILHFIVPGMPEESREDTEFHHKLNMVKKQCFKNDIHKLVLAALNRFIGNPGIQKCGL KVISSIVHFPDALEMLSLEGAMDSVLHTLQMYPDDQEIQCLGLSLIGYLITKKNVFIGT GHLLAKILVSSLYRFKDVAEIQTKGFQTILAILKLSASFSKLLVHHSFDLVIFHQMSSNI MEQKDQQFLNLCCKCFAKVAMDDYLKNVMLERACDQNNSIMVECLLLLGADANQ AKEGSSLICQVCEKESSPKLVELLLNSGSREQDVRKALTISIGKGDSQIISLLLRRLALD VANNSICLGGFCIGKVEPSWLGPLFPDKTSNLRKQTNIASTLARMVIRYQMKSAVEE GTASGSDGNFSEDVLSKFDEWTFIPDSSMDSVFAQSDDLDSEGSEGSFLVKKKSNSIS VGEFYRDAVLQRCSPNLQRHSNSLGPIFDHEDLLKRKRKILSSDDSLRSSKLQSHMRH SDSISSLASEREYITSLDLSANELRDIDALSQKCCISVHLEHLEKLELHQNALTSFPQQL CETLKSLTHLDLHSNKFTSFPSYLLKMSCIANLDVSRNDIGPSVVLDPTVKCPTLKQF NLSYNQLSFVPENLTDVVEKLEQLILEGNKISGICSPLRLKELKILNLSKNHISSLSENF LEACPKVESFSARMNFLAAMPFLPPSMTILKLSQNKFSCIPEAILNLPHLRSLDMSSND IQYLPGPAHWKSLNLRELLFSHNQISILDLSEKAYLWSRVEKLHLSHNKLKEIPPEIGC LENLTSLDVSYNLELRSFPNEMGKLSKIWDLPLDELHLNFDFKHIGCKAKDIIRFLQQ RLKKAVPYNRMKLMIVGNTGSGKTTLLQQLMKTKKSDLGMQSATVGIDVKDWPIQ IRDKRKRDLVLNVWDFAGREEFYSTHPHFMTQRALYLAVYDLSKGQAEVDAMKPW LFNIKARASSSPVILVGTHLDVSDEKQRKACMSKITKELLNKRGFPAIRDYHFVNATE ESDALAKLRKTIINESLNFKIRDQLVVGQLIPDCYVELEKIILSERKNVPIEFPVIDRKR LLQLVRENQLQLDENELPHAVHFLNESGVLLHFQDPALQLSDLYFVEPKWLCKIMA QILTVKVEGCPKHPKGIISRRDVEKFLSKKRKFPKNYMSQYFKLLEKFQIALPIGEEYL LVPSSLSDHRPVIELPHCENSEIIIRLYEMPYFPMGFWSRLINRLLEISPYMLSGRERAL RPNRMYWRQGIYLNWSPEAYCLVGSEVLDNHPESFLKITVPSCRKGCILLGQVVDHI DSLMEEWFPGLLEIDICGEGETLLKKWALYSFNDGEEHQKILLDDLMKKAEEGDLLV NPDQPRLTIPISQIAPDLILADLPRNIMLNNDELEFEQAPEFLLGDGSFGSVYRAAYEG EEVAVKIFNKHTSLRLLRQELVVLCHLHHPSLISLLAAGIRPRMLVMELASKGSLDRL LQQDKASLTRTLQHRIALHVADGLRYLHSAMITYRDLKPHNVLLFTLYPNAAIIAKIA DYGIAQYCCRMGIKTSEGTPGFRAPEVARGNVIYNQQADVYSFGLLLYDILTTGGRI VEGLKFPNEFDELEIQGKLPDPVKEYGCAPWPMVEKLIKQCLKENPQERPTSAQVFDI LNSAELVCLTRRILLPKNVIVECMVATHHNSRNASIWLGCGHTDRGQLSFLDLNTEG YTSEEVADSRILCLALVHLPVEKESWIVSGTQSGTLLVINTEDGKKRHTLEKMTDSVT CLYCNSFSKQSKQKNFLLVGTADGKLAIFEDKTVKLKGAAPLKILNIGNVSTPLMCL SESTNSTERNVMWGGCGTKIFSFSNDFTIQKLIETRTSQLFSYAAFSDSNIITVVVDTA LYIAKQNSPVVEVWDKKTEKLCGLIDCVHFLREVMVKENKESKHKMSYSGRVKTL CLQKNTALWIGTGGGHILLLDLSTRRLIRVIYNFCNSVRVMMTAQLGSLKNVMLVL GYNRKNTEGTQKQKEIQSCLTVWDINLPHEVQNLEKHIEVRKELAEKMRRTSVE (SEQ ID NO: 3) Parkinson's disease is a progressive nervous system disorder that affects movement. Symptoms typically start gradually, sometimes starting with a barely noticeable tremor in just one hand. Tremors may be common, but the disorder also commonly causes stiffness or slowing of movement. In the early stages of Parkinson's disease, a subject's face may show little or no expression. The patient's arms may not swing when while walking. Speech may become soft or slurred. Parkinson's disease symptoms generally worsen over time.

[0914] Signs and symptoms of Parkinson's disease vary between patients. Early signs may be mild and go unnoticed. Symptoms often begin on one side of the body and usually remain worse on that side, even after symptoms begin to affect both sides. Signs and symptoms of Parkinson's disease include, but are not limited to one or more of tremors, slowed movement (bradykinesia); rigid muscles; impaired posture and balance; loss of automatic movements (e.g., a decreased ability to perform unconscious movements, including blinking, smiling or swinging the arms while walking); speech changes (e.g., speaking softly, quickly, slurring, or hesitating before talking; speech may be more of a monotone rather than with the usual inflections); writing changes (e.g., it may become hard to write, and writing may appear small); blood pressure changes (e.g., a patient may feel dizzy or lightheaded when standing due to a sudden drop in blood pressure (orthostatic hypotension)); smell dysfunction (e.g., a patient may experience problems with sense of smell.); fatigue (e.g., many patients with Parkinson's disease lose energy and experience fatigue, especially later in the day): pain (e.g., some patients with Parkinson's disease experience pain, either in specific areas of their bodies or throughout their bodies); sexual dysfunction (e.g., some patients with Parkinson's disease notice a decrease in sexual desire or performance); or a combination thereof.

[0915] The subject may exhibit an improvement in one or more of the symptoms of Parkinson's Disease. In one embodiment, the improvement in one or more of the symptoms is at least 5%. In another embodiment, the improvement in one or more of the symptoms is at least 10%. In another embodiment, the improvement in one or more of the symptoms is at least 15%. In another embodiment, the improvement in one or more of the symptoms is at least 20%. In another embodiment, the improvement in one or more of the symptoms is at least 25%. In another embodiment, the improvement in one or more of the symptoms is at least 30%. In another embodiment, the improvement in one or more of the symptoms is at least 35%. In another embodiment, the improvement in one or more of the symptoms is at least 40%. In another embodiment, the improvement in one or more of the symptoms is at least 50%. In another embodiment, the improvement in one or more of the symptoms is at least 60%. In another embodiment, the improvement in one or more of the symptoms is at least 70%. In another embodiment, the improvement in one or more of the symptoms is at least 75%. In another embodiment, the improvement in one or more of the symptoms is at least 80%. In another embodiment, the improvement in one or more of the symptoms is at least 85%. In another embodiment, the improvement in one or more of the symptoms is at least 90%. In another embodiment, the improvement in one or more of the symptoms is at least 95%.

[0916] Provided also are methods of treating PD and/or the genetic mutations in LRRK2 that cause PD that comprise administering to a subject (e.g., a mammal, such as a human) a therapeutically effective amount of a pharmaceutical composition that comprises a polynucleotide encoding a base editor system (e.g., base editor and gRNA) described herein. In some embodiments, the base editor is a fusion protein that comprises a polynucleotide programmable DNA binding domain and an adenosine deaminase domain or a cytidine deaminase domain. A cell of the subject is transduced with the base editor and one or more guide polynucleotides that target the base editor to effect an A•T to G•C alteration (if the cell is transduced with an adenosine deaminase domain) or a C•G to U•A alteration (if the cell is transduced with a cytidine deaminase domain) of a nucleic acid sequence containing mutations in the LRRK2 gene.

[0917] The methods herein include administering to the subject (including a subject identified as being in need of such treatment, or a subject suspected of being at risk of disease and in need of such treatment) an effective amount of a composition described herein. Identifying a subject in need of such treatment can be in the judgment of a subject or a health care professional and can be subjective (e.g. opinion) or objective (e.g. measurable by a test or diagnostic method).

[0918] The therapeutic methods, in general, comprise administration of a therapeutically effective amount of a pharmaceutical composition comprising, for example, a vector encoding a base editor and a gRNA that targets the LRRK2 gene of a subject (e.g., a human patient) in need thereof. Such treatment will be suitably administered to a subject, particularly a human subject, suffering from, having, susceptible to, or at risk for PD. The compositions herein may be also used in the treatment of any other disorders in which PD may be implicated.

[0919] In some embodiments, the guide RNA targets LRRK gene at a target sequence

(SEQ ID NO: 295)
GCTCGCCCTTCTTCTTCCCCTGTGA,
(SEQ ID NO: 296)
GTCTTTCCCTCCAGGCTCGCCCTTCTTCTTCCCCTGTGA,
(SEQ ID NO: 297)
TCACAGGGGAAGAAGAAGGGCGAGC,
or
(SEQ ID NO: 298)
TCACAGGGGAAGAAGAAGGGCGAGCCTGGAGGGAAAGAC.
In some embodiments, the guide RNA comprises
sequence
(SEQ ID NO: 299)
GCUCGCCCUUCUUCUUCCCCUGUGA,
(SEQ ID NO: 300)
GUCUUUCCCUCCAGGCUCGCCCUUCUUCUUCCCCUGUGA,
(SEQ ID NO: 301)
UCACAGGGGAAGAAGAAGGGCGAGC,
or
(SEQ ID NO: 302)
UCACAGGGGAAGAAGAAGGGCGAGCCUGGAGGGAAAGAC.
In some embodiments, the guide RNA comprises
sequence
(SEQ ID NO: 303)
UCCGACUAUAUGAAAUGCCUUAUUUUCCAAUGGGAUUUUGG
or
(SEQ ID NO: 304)
UUGCAAAGAUUGCUGACUAGGGCAUUGCUCAGUACUGCUGUAGAAUGG.

[0920] In one embodiment, a method of monitoring treatment progress is provided. The method includes the step of determining a level of diagnostic marker (Marker) (e.g., SNP associated with PD) or diagnostic measurement (e.g., screen, assay) in a subject suffering from or susceptible to a disorder or symptoms thereof associated with PD in which the subject has been administered a therapeutic amount of a composition herein sufficient to treat the disease or symptoms thereof. The level of Marker determined in the method can be compared to known levels of Marker in either healthy normal controls or in other afflicted patients to establish the subject's disease status. In preferred embodiments, a second level of Marker in the subject is determined at a time point later than the determination of the first level, and the two levels are compared to monitor the course of disease or the efficacy of the therapy. In certain preferred embodiments, a pre-treatment level of Marker in the subject is determined prior to beginning treatment according to this invention; this pre-treatment level of Marker can then be compared to the level of Marker in the subject after the treatment commences, to determine the efficacy of the treatment.

[0921] In some embodiments, compositions provided herein are administered to a subject, for example, to a human subject, in order to effect a targeted genomic modification within the subject. In some embodiments, cells are obtained from the subject and contacted with any of the pharmaceutical compositions provided herein. In some embodiments, cells removed from a subject and contacted ex vivo with a pharmaceutical composition are re-introduced into the subject, optionally after the desired genomic modification has been effected or detected in the cells. Methods of delivering pharmaceutical compositions comprising nucleases are known, and are described, for example, in U.S. Pat. Nos. 6,453,242; 6,503,717; 6,534,261; 6,599,692; 6,607,882; 6,689,558; 6,824,978; 6,933,113; 6,979,539; 7,013,219; and 7,163,824, the disclosures of all of which are incorporated by reference herein in their entireties. Although the descriptions of pharmaceutical compositions provided herein are principally directed to pharmaceutical compositions which are suitable for administration to humans, it will be understood by the skilled artisan that such compositions are generally suitable for administration to animals or organisms of all sorts, for example, for veterinary use.

### Hurler Syndrome (HS)

[0922] Hurler Syndrome is the most severe form of mucopolysaccharidosis type 1 (MPS1), a rare autosomal recessive lysosomal storage disorder that occurs in about one in 200,000 births. MPS1 is characterized by skeletal abnormalities, cognitive impairment, heart disease, respiratory problems, enlarged liver and spleen, and reduced life expectancy. MPS1 is caused by mutations in alpha-L-iduronidase (IDUA) gene, leading to deficiency of alpha-L-iduronidase, which is essential for the breakdown of glycosaminoglycans in lysosomes. The standard of care for patients with Hurler Syndrome is bone marrow transplantation, but this treatment cannot correct any damage already incurred, especially in the central nervous system, and there are risks of mortality associated with transplantation. Therefore, there is a need for novel compositions and methods for treating patients with Hurler Syndrome.

[0923] The present disclosure provides methods for the treatment of Hurler Syndrome that are associated with or caused by a point mutation that can be corrected and/or symptoms can be treated or ameliorated by base editor mediated gene editing.

[0924] Provided also are methods of treating Hurler Syndrome and/or the genetic mutations in IDUA gene that cause Hurler Syndrome that comprise administering to a subject (e.g., a mammal, such as a human) a therapeutically effective amount of a pharmaceutical composition that comprises a polynucleotide encoding a base editor system (e.g., ABE8 base editor and gRNA) described herein. In some embodiments, the base editor is a fusion protein that comprises a polynucleotide programmable DNA binding domain and an adenosine deaminase domain. A cell of the subject is transduced with the base editor and one or more guide polynucleotides that target the base editor to effect an A•T to G•C alteration of a nucleic acid sequence containing mutations in the IDUA gene.

[0925] An exemplary amino acid sequence of the IDUA polypeptide is provided below:

>sp|P35475|IDUA_HUMAN Alpha-L-iduronidase OS =
Homo sapiens OX = 9606 GN = IDUA PE = 1 SV = 2
(SEQ ID NO: 4)
MRPLRPRAALLALLASLLAAPPVAPAEAPHLVHVDAARALWPLRRFWRS
TGFCPPLPHSQADQYVLSWDQQLNLAYVGAVPHRGIKQVRTHWLLELVT
TRGSTGRGLSYNFTHLDGYLDLLRENQLLPGFELMGSASGHFTDFEDKQ
QVFEWKDLVSSLARRYIGRYGLAHVSKWNFETWNEPDHHDFDNVSMTMQ
GFLNYYDACSEGLRAASPALRLGGPGDSFHTPPRSPLSWGLLRHCHDGT
NFFTGEAGVRLDYISLHRKGARSSISILEQEKVVAQQIRQLFPKFADTP
IYNDEADPLVGWSLPQPWRADVTYAAMVVKVIAQHQNLLLANTTSAFPY
ALLSNDNAFLSYHPHPFAQRTLTARFQVNNTRPPHVQLLRKPVLTAMGL
LALLDEEQLWAEVSQAGTVLDSNHTVGVLASAHRPQGPADAWRAAVLIY
ASDDTRAHPNRSVAVTLRLRGVPPGPGLVYVTRYLDNGLCSPDGEWRRL
GRPVFPTAEQFRRMRAAEDPVAAAPRPLPAGGRLTLRPALRLPSLLLVH
VCARPEKPPGQVTRLRALPLTQGQLVLVWSDEHVGSKCLWTYEIQFSQD
GKAYTPVSRKPSTFNLFVFSPDTGAVSGSYRVRALDYWARPGPFSDPVP
YLEVPVPRGPPSPGNP.

[0926] The methods herein include administering to the subject (including a subject identified as being in need of such treatment, or a subject suspected of being at risk of disease and in need of such treatment) an effective amount of a composition described herein. Identifying a subject in need of such treatment can be in the judgment of a subject or a health care professional and can be subjective (e.g., opinion) or objective (e.g., measurable by a test or diagnostic method).

[0927] The therapeutic methods, in general, comprise administration of a therapeutically effective amount of a pharmaceutical composition comprising, for example, a vector encoding a base editor and a gRNA that targets the IDUA gene of a subject (e.g., a human patient) in need thereof. Such treatment will be suitably administered to a subject, particularly a human subject, suffering from, having, susceptible to, or at risk for Hurler Syndrome. The compositions herein may be also used in the treatment of any other disorders in which Hurler Syndrome may be implicated. The guide RNA sequences may comprise a spacer sequence CTTTTCACTTTTCCTGCCGGGG (SEQ ID NO: 305) (R255X), AGCTTCCATGTCCAGCCTTC (SEQ ID NO: 306) (R106W), ACCATGAAGTCAAAATCATT (SEQ ID NO: 307) (T158M), or GCTTTCAGCCCCGTTTCTTG (SEQ ID NO: 308) (R270X).

[0928] In one embodiment, the invention provides a method of monitoring treatment progress is provided. The method includes the step of determining a level of diagnostic marker (Marker) (e.g., SNP associated with Hurler Syndrome) or diagnostic measurement (e.g., screen, assay) in a subject suffering from or susceptible to a disorder or symptoms thereof associated with Hurler Syndrome in which the subject has been administered a therapeutic amount of a composition herein sufficient to treat the disease or symptoms thereof. The level of Marker determined in the method can be compared to known levels of Marker in either healthy normal controls or in other afflicted patients to establish the subject's disease status. In preferred embodiments, a second level of Marker in the subject is determined at a time point later than the determination of the first level, and the two levels are compared to monitor the course of disease or the efficacy of the therapy. In certain preferred embodiments, a pre-treatment level of Marker in the subject is determined prior to beginning treatment according to this invention; this pre-treatment level of Marker can then be compared to the level of Marker in the subject after the treatment commences, to determine the efficacy of the treatment.

[0929] In some embodiments, cells are obtained from the subject and contacted with a pharmaceutical composition as provided herein. In some embodiments, cells removed from a subject and contacted ex vivo with a pharmaceutical composition are re-introduced into the subject, optionally after the desired genomic modification has been affected or detected in the cells. Methods of delivering pharmaceutical compositions comprising nucleases are described, for example, in U.S. Pat. Nos. 6,453,242; 6,503,717; 6,534,261; 6,599,692; 6,607,882; 6,689,558; 6,824,978; 6,933,113; 6,979,539; 7,013,219; and 7,163,824, the disclosures of all of which are incorporated by reference herein in their entireties. Although the descriptions of pharmaceutical compositions provided herein are principally directed to pharmaceutical compositions which are suitable for administration to humans, it will be understood by the skilled artisan that such compositions are generally suitable for administration to animals or organisms of all sorts, for example, for veterinary use.

[0930] One or more symptoms of Hurler Syndrome to be treated include, but are not limited to, coarse facial features, conical clouding, hepatomegaly, kyphosis/gibbus, hernias, airway-related symptoms, such as sleep disturbances/snoring, splenomegaly, cardiac valve abnormalities, cognitive impairment, dystosis multiplex, enlarged tongue, joint contractures, enlarged tonsils; or a combination thereof.

[0931] The subject may exhibit an improvement in one or more of the symptoms of Hurler Syndrome. In one embodiment, the improvement in one or more of the symptoms is at least 5%. In another embodiment, the improvement in one or more of the symptoms is at least 10%. In another embodiment, the improvement in one or more of the symptoms is at least 15%. In another embodiment, the improvement in one or more of the symptoms is at least 20%. In another embodiment, the improvement in one or more of the symptoms is at least 25%. In another embodiment, the improvement in one or more of the symptoms is at least 30%. In another embodiment, the improvement in one or more of the symptoms is at least 35%. In another embodiment, the improvement in one or more of the symptoms is at least 40%. In another embodiment, the improvement in one or more of the symptoms is at least 50%. In another embodiment, the improvement in one or more of the symptoms is at least 60%. In another embodiment, the improvement in one or more of the symptoms is at least 70%. In another embodiment, the improvement in one or more of the symptoms is at least 75%. In another embodiment, the improvement in one or more of the symptoms is at least 80%. In another embodiment, the improvement in one or more of the symptoms is at least 85%. In another embodiment, the improvement in one or more of the symptoms is at least 90%. In another embodiment, the improvement in one or more of the symptoms is at least 95%.

### Rett Syndrome (RTT)

[0932] Provided also are methods of treating Rett Syndrome (RTT) and/or the genetic mutations in Mecp2 that cause RTT that comprise administering to a subject (e.g., a mammal, such as a human) a therapeutically effective amount of a pharmaceutical composition that comprises a polynucleotide encoding a base editor system (e.g., base editor and gRNA) described herein. In some embodiments, the base editor is a fusion protein that comprises a polynucleotide programmable DNA binding domain and an adenosine deaminase domain or a cytidine deaminase domain. A cell of the subject is transduced with the base editor and one or more guide polynucleotides that target the base editor to effect an A•T to G•C alteration (if the cell is transduced with an adenosine deaminase domain) or a C•G to U•A alteration (if the cell is transduced with a cytidine deaminase domain) of a nucleic acid sequence containing mutations in the Mecp2 gene.

[0933] An exemplary amino acid sequence of the MECP2 polypeptide is provided below:

>sp|P51608|MECP2_HUMAN Methyl-CpG-binding protein
2 OS = Homo sapiens OX = 9606 GN = MECP2 PE = 1
SV = 1
(SEQ ID NO: 5)
MVAGMLGLREEKSEDQDLQGLKDKPLKFKKVKKDKKEEKEGKHEPVQPS
AHHSAEPAEAGKAETSEGSGSAPAVPEASASPKQRRSIIRDRGPMYDDP
TLPEGWTRKLKQRKSGRSAGKYDVYLINPQGKAFRSKVELIAYFEKVGD
TSLDPNDFDFTVTGRGSPSRREQKPPKKPKSPKAPGTGRGRGRPKGSGT
TRPKAATSEGVQVKRVLEKSPGKLLVKMPFQTSPGGKAEGGGATTSTQV
MVIKRPGRKRKAEADPQAIPKKRGRKPGSVVAAAAAEAKKKAVKESSIR
SVQETVLPIKKRKTRETVSIEVKEVVKPLLVSTLGEKSGKGLKTCKSPG
RKSKESSPKGRSSSASSPPKKEHHHHHHHSESPKAPVPLLPPLPPPPPE
PESSEDPTSPPEPQDLSSSVCKEEKMPRGGSLESDGCPKEPAKTQPAVA
TAATAAEKYKHRGEGERKDIVSSSMPRPNREEPVDSRTPVTERVS.

[0934] The guide RNA sequences may comprise a spacer

(R255X)
(SEQ ID NO: 305)
CTTTTCACTTTTCCTGCCGGGG,
(R106W)
(SEQ ID NO: 306)
AGCTTCCATGTCCAGCCTTC,
(T158M)
(SEQ ID NO: 307)
ACCATGAAGTCAAAATCATT,
or
(R270X)
(SEQ ID NO: 308)
GCTTTCAGCCCCGTTTCTTG.

[0935] The methods herein include administering to the subject (including a subject identified as being in need of such treatment, or a subject suspected of being at risk of disease and in need of such treatment) an effective amount of a composition described herein. Identifying a subject in need of such treatment can be in the judgment of a subject or a health care professional and can be subjective (e.g. opinion) or objective (e.g. measurable by a test or diagnostic method).

[0936] The therapeutic methods, in general, comprise administration of a therapeutically effective amount of a pharmaceutical composition comprising, for example, a vector encoding a base editor and a gRNA that targets the Mecp2 gene of a subject (e.g., a human patient) in need thereof. Such treatment will be suitably administered to a subject, particularly a human subject, suffering from, having, susceptible to, or at risk for RTT. The compositions herein may be also used in the treatment of any other disorders in which RTT may be implicated.

[0937] In one embodiment, the invention provides a method of monitoring treatment progress is provided. The method includes the step of determining a level of diagnostic marker (Marker) (e.g., SNP associated with RTT) or diagnostic measurement (e.g., screen, assay) in a subject suffering from or susceptible to a disorder or symptoms thereof associated with RTT in which the subject has been administered a therapeutic amount of a composition herein sufficient to treat the disease or symptoms thereof. The level of Marker determined in the method can be compared to known levels of Marker in either healthy normal controls or in other afflicted patients to establish the subject's disease status. In preferred embodiments, a second level of Marker in the subject is determined at a time point later than the determination of the first level, and the two levels are compared to monitor the course of disease or the efficacy of the therapy. In certain preferred embodiments, a pre-treatment level of Marker in the subject is determined prior to beginning treatment according to this invention; this pre-treatment level of Marker can then be compared to the level of Marker in the subject after the treatment commences, to determine the efficacy of the treatment.

[0938] In some embodiments, cells are obtained from the subject and contacted with a pharmaceutical composition as provided herein. In some embodiments, cells removed from a subject and contacted ex vivo with a pharmaceutical composition are re-introduced into the subject, optionally after the desired genomic modification has been effected or detected in the cells. Methods of delivering pharmaceutical compositions comprising nucleases are described, for example, in U.S. Pat. Nos. 6,453,242; 6,503,717; 6,534,261; 6,599,692; 6,607,882; 6,689,558; 6,824,978; 6,933,113; 6,979,539; 7,013,219; and 7,163,824, the disclosures of all of which are incorporated by reference herein in their entireties. Although the descriptions of pharmaceutical compositions provided herein are principally directed to pharmaceutical compositions which are suitable for administration to humans, it will be understood by the skilled artisan that such compositions are generally suitable for administration to animals or organisms of all sorts, for example, for veterinary use.

[0939] One or more symptoms of Rett Syndrome include, but are not limited to, bedtime resistance, sleep onset delay, sleep duration, sleep anxiety, night wakings, parasomnias, sleep disordered breathing, daytime sleepiness, hand function, walking, verbal and non-verbal communication, comprehension, attention, behavior problems, mood, seizure activity, behavior and emotional features, or a combination thereof.

[0940] The subject may exhibit an improvement in one or more of the symptoms of Rett Syndrome. In one embodiment, the improvement in one or more of the symptoms is at least 5%. In another embodiment, the improvement in one or more of the symptoms is at least 10%. In another embodiment, the improvement in one or more of the symptoms is at least 15%. In another embodiment, the improvement in one or more of the symptoms is at least 20%. In another embodiment, the improvement in one or more of the symptoms is at least 25%. In another embodiment, the improvement in one or more of the symptoms is at least 30%. In another embodiment, the improvement in one or more of the symptoms is at least 35%. In another embodiment, the improvement in one or more of the symptoms is at least 40%. In another embodiment, the improvement in one or more of the symptoms is at least 50%. In another embodiment, the improvement in one or more of the symptoms is at least 60%. In another embodiment, the improvement in one or more of the symptoms is at least 70%. In another embodiment, the improvement in one or more of the symptoms is at least 75%. In another embodiment, the improvement in one or more of the symptoms is at least 80%. In another embodiment, the improvement in one or more of the symptoms is at least 85%. In another embodiment, the improvement in one or more of the symptoms is at least 90%. In another embodiment, the improvement in one or more of the symptoms is at least 95%.

### Kits

[0941] Various aspects of this disclosure provide kits comprising a base editor system. In one embodiment, the kit comprises a nucleic acid construct comprising a nucleotide sequence encoding a nucleobase editor fusion protein. The fusion protein comprises a deaminase (e.g., cytidine deaminase or adenine deaminase) and a nucleic acid programmable DNA binding protein (napDNAbp). In some embodiments, the kit comprises at least one guide RNA capable of targeting a nucleic acid molecule of interest. In some embodiments, the kit comprises a nucleic acid construct comprising a nucleotide sequence encoding at least one guide RNA.

[0942] The kit provides, in some embodiments, instructions for using the kit to edit one or more mutations. The instructions will generally include information about the use of the kit for editing nucleic acid molecules. In other embodiments, the instructions include at least one of the following: precautions; warnings; clinical studies; and/or references. The instructions may be printed directly on the container (when present), or as a label applied to the container, or as a separate sheet, pamphlet, card, or folder supplied in or with the container. In a further embodiment, a kit can comprise instructions in the form of a label or separate insert (package insert) for suitable operational parameters. In yet another embodiment, the kit can comprise one or more containers with appropriate positive and negative controls or control samples, to be used as standard(s) for detection, calibration, or normalization. The kit can further comprise a second container comprising a pharmaceutically-acceptable buffer, such as (sterile) phosphate-buffered saline, Ringer's solution, or dextrose solution. It can further include other materials desirable from a commercial and user standpoint, including other buffers, diluents, filters, needles, syringes, and package inserts with instructions for use.

[0943] The practice of the present invention employs, unless otherwise indicated, conventional techniques of molecular biology (including recombinant techniques), microbiology, cell biology, biochemistry and immunology, which are well within the purview of the skilled artisan. Such techniques are explained fully in the literature, such as, “Molecular Cloning: A Laboratory Manual”, second edition (Sambrook, 1989); “Oligonucleotide Synthesis” (Gait, 1984); “Animal Cell Culture” (Freshney, 1987); “Methods in Enzymology” “Handbook of Experimental Immunology” (Weir, 1996); “Gene Transfer Vectors for Mammalian Cells” (Miller and Calos, 1987); “Current Protocols in Molecular Biology” (Ausubel, 1987); “PCR: The Polymerase Chain Reaction”, (Mullis, 1994); “Current Protocols in Immunology” (Coligan, 1991). These techniques are applicable to the production of the polynucleotides and polypeptides of the invention, and, as such, may be considered in making and practicing the invention. Particularly useful techniques for particular embodiments will be discussed in the sections that follow.

[0944] The following examples are put forth so as to provide those of ordinary skill in the art with a complete disclosure and description of how to make and use the assay, screening, and therapeutic methods of the invention, and are not intended to limit the scope of what the inventors regard as their invention.

### EXAMPLES

### Example 1: Adenosine Base Editors with Increased Editing Efficiency

[0945] Base editing systems that include a Tad7.10-dCas9 fusion proteins are capable of editing a target polynucleotide with approximately 10-20% efficiency, but for uses requiring higher efficiency their use may be limited. In an effort to identify adenine base editors having increased efficiency and specificity, constructs comprising the adenosine deaminase TadA 7.10 were mutagenized by error prone PCR and subsequently cloned into an expression vector adjacent to a nucleic acid sequence encoding dCas9, a nucleic acid programmable DNA binding protein (FIG. 1A). The expression vectors comprising the adenosine deaminase variants were co-transformed into competent bacterial cells with a selection plasmid encoding chloramphenicol resistance (CamR) and spectinomycin resistance (SpectR) and having a kanamycin resistance gene that was rendered nonfunctional by two point mutations (evolution round 7 strategy) (FIG. 1B). The cells were selected for restoration of kanamycin resistance, which was a read out for adenosine deaminase activity. In subsequent rounds of selection, the expression vectors were co-transformed into competent cells with a plasmid encoding chloramphenicol resistance (CamR) and spectinomycin resistance (SpectR) and having a kanamycin resistance gene that was rendered nonfunctional by three point mutations (evolution round 8 strategy) (FIG. 1C). An inactivated kanamycin resistance gene nucleic acid sequence is provided below:

(SEQ ID NO: 309)
ccggaattgccagctggggcgccctctggtaaggttgggaagccctgca
aagtaaactggatggctttcttgccgccaaggatctgatggcgcagggg
atcaagatctgatcaagagacaggatgaggatcctttcgcATGATCGAA
TAAGATGGATTGCACGCAGGTTCTCCGGCCGCTTAGGTGGAGCGCCTAT
TCGGCTATGACTGGGCACAACAGACAATCGGCTGCTCTGATGCCGCCGT
GTTCCGGCTGTCAGCGCAGGGGCGCCCGGTTCTTTTTGTCAAGACCGAC
CTGTCCGGTGCCCTGAATGAACTGCAGGACGAGGCAGCGCGGCTATCGT
GGCTGGCCACGACGGGCGTTCCTTGCGCAGCTGTGCTCGACGTTGTCAC
TGAAGCGGGAAGGGACTGGCTGCTATTGGGCGAAGTGCCGGGGCAGGAT
CTCCTGTCATCTCACCTTGCTCCTGCCGAGAAAGTATCCATCATGGCTG
ATGCAATGCGGCGGCTGCATACGCTTGATCCGGCTACCTGCCCATTCGA
CCACCAAGCGAAACATCGCATCGAGCGAGCACGTACTCGGATGGAAGCC
GGTCTTGTCGATCAGGATGATCTGGACGAAGAGCATCAGGGGCTCGCGC
CAGCCGAACTGTTCGCCAGGCTCAAGGCGCGCATGCCCGACGGCGAGGA
TCTCGTCGTGACCCATGGCGATGCCTGCTTGCCGAATATCATGGTGGAA
AATGGCCGCTTTTCTGGATTCATTAACTGTGGCCGGCTGGGTGTGGCGG
ACCGCTATCAGGACATAGCGTTGGCTACCCGTGATATTGCTGAAGAGCT
TGGCGGCGAATGGGCTGACCGCTTCCTCGTGCTTTACGGTATCGCCGCT
CCCGATTCGCAGCGCATCGCCTTCTATCGCCTTCTTGACGAGTTCTTCT
AA

[0946] In the above sequence, lower case denotes the kanamycin resistance promoter region, bold sequence indicates targeted inactivation portion (Q4* and W15*), the italicized sequence denotes the targeted inactive site of kanamycin resistance gene (D208N), and the underlined sequences denote the PAM sequences.

[0947] Again, the cells were plated onto a series of agarose plates with increasing kanamycin concentration. As shown in FIG. 2, adenosine deaminase variants having efficient base editing activity were able to correct the mutations present in the kanamycin resistance gene and were selected for further analysis. Adenosine deaminase variant base editors showing efficient base editing in bacterial cells are described in Table 13. Mammalian expression vectors encoding base editors comprising the selected adenosine deaminase variants were generated.

[0948] Hek293T cells expressing a β-globin protein associated with sickle cell disease that contains an E6V (also termed E7V) mutation were used to test the editing efficiency of the adenosine deaminase variants (FIGS. 3A and 3B). These cells termed “Hek293T/HBBE6V” cells were transduced using lentiviral vectors expressing a base editing system that includes a fusion protein comprising the ABE8 base editors listed in Table 13. The ABE8 base editors were generated by cloning an adenosine deaminase variant into a scaffold that included a circular permutant Cas9 and a bipartite nuclear localization sequence. Circular permutant Cas9s are known in the art and described, for example, in Oakes et al., Cell 176, 254-267, 2019. These sequences are provided herein below.

[0949] Upregulation of fetal hemoglobin is a therapeutic approach to overcoming sickle cell disease. FIG. 3A shows a therapeutically relevant site for upregulation of fetal hemoglobin. Editing adenosines at residues 5 and 8 can significantly reduce BCL11A binding, thereby increasing expression of fetal hemoglobin. Referring to FIG. 3A, the ABE8 base editors exhibited approximately 2-3 fold more base editing activity than the ABE7.10 base editor.

TABLE 13
Novel Adenine Base Editors ABE8

| plasmid ID | description | function |
|---|---|---|
| 280 | ABE8.1 | monomer_TadA*7.10 + Y147T |
| 281 | ABE8.2 | monomer_TadA*7.10 + Y147R |
| 282 | ABE8.3 | monomer_TadA*7.10 + Q154S |
| 283 | ABE8.4 | monomer_TadA*7.10 + Y123H |
| 284 | ABE8.5 | monomer_TadA*7.10 + V82S |
| 285 | ABE8.6 | monomer_TadA*7.10 + T166R |
| 286 | ABE8.7 | monomer_TadA*7.10 + Q154R |
| 287 | ABE8.8 | monomer_Y147R_Q154R_Y123H |
| 288 | ABE8.9 | monomer_Y147R_Q154R_I76Y |
| 289 | ABE8.10 | monomer_Y147R_Q154R_T166R |
| 290 | ABE8.11 | monomer_Y147T_Q154R |
| 291 | ABE8.12 | monomer_Y147T_Q154S |
| 292 | ABE8.13 | monomer_H123Y123H_Y147R_Q154R_I76Y |
| 293 | ABE8.14 | heterodimer_TadA*7.10 + Y147T |
| 294 | ABE8.15 | heterodimer_TadA*7.10 + Y147R |
| 295 | ABE8.16 | heterodimer_TadA*7.10 + Q154S |
| 296 | ABE8.17 | heterodimer_TadA*7.10 + Y123H |
| 297 | ABE8.18 | heterodimer_TadA*7.10 + V82S |
| 298 | ABE8.19 | heterodimer_TadA*7.10 + T166R |
| 299 | ABE8.20 | heterodimer_TadA*7.10 + Q154R |
| 300 | ABE8.21 | heterodimer_Y147R_Q154R_Y123H |
| 301 | ABE8.22 | heterodimer_Y147R_Q154R_I76Y |
| 302 | ABE8.23 | heterodimer_Y147R_Q154R_T166R |
| 303 | ABE8.24 | heterodimer_Y147T_Q154R |
| 304 | ABE8.25 | heterodimer_Y147T_Q154S |

[0950] Referring to FIG. 4, the ABE8 base editors were introduced into Hek293T/HBBE6V cells along with 18, 19, 20, 21, or 22 nucleotide guide RNAs targeting the polynucleotide encoding HBB E6V. The ABE8 editors showed increased editing efficiency when fused to circular permutant (Cp)-Cas9. In total, 40 different ABE8 constructs (Table 14) and three ABE7.10 constructs were tested for editing activity in Hek293T/HBBE6V cells. The sequence of exemplary constructs follows. To evaluate the specificity of editing, target and unintended or bystander mutations were monitored (FIG. 5). Unintended editing of an adenosine in codon 5 was silent. However, unintended editing of codon 9 resulted in a serine to proline mutation. Referring again to FIG. 5, multiple ABE8 base editors showed increased editing efficiency and specificity compared to the ABE7.10 editors, and none of the editors had significant bystander editing that led to the serine to proline missense mutation.

[0951] Further analysis of selected ABE8 base editors and an ABE7.10 base editor control was carried out in fibroblast cells containing the sickle cell mutation. As shown in FIG. 6, the ABE8 editors had increased base editing activity compared to the ABE7.10. ABE8.18 showed approximately 70% efficiency. The selected ABE8 editors also displayed unprecedented specificity. Importantly, the average INDEL formation for all ABE8 editors was less than 0.1%.

TABLE 14

| plasmid ID | description | function |
|---|---|---|
| 335 | NGC PAM CP5 variant (S. pyogenes Cas9)_ABE8.1 | monomer_TadA*7.10 + Y147T |
| 336 | NGC PAM CP5 variant (S. pyogrouns Cas9)_ABE8.2 | monomer_TadA*7.10 + Y147R |
| 337 | NGC PAM CP5 variant (S. pyogenes Cas9)_ABE8.3 | monomer_TadA*7.10 + Q154S |
| 338 | NGC PAM CP5 variant (S. pyogenes Cas9)_ABE8.4 | monomer_TadA*7.10 + Y123H |
| 339 | NGC PAM CP5 variant (S. pyogenes Cas9)_ABE8.5 | monomer_TadA*7.10 + V82S |
| 340 | NGC PAM CP5 variant (S. pyogenes Cas9)_ABE8.6 | monomer_TadA*7.10 + T166R |
| 341 | NGC PAM CP5 variant (S. pyogenes Cas9)_ABE8.7 | monomer_TadA*7.10 + Q154R |
| 342 | NGC PAM CP5 variant (S. pyogenes Cas9)_ABE8.8 | monomer_Y147R_Q154R_Y123H |
| 343 | NGC PAM CP5 variant (S. pyogenes Cas9)_ABE8.9 | monomer_Y147R_Q154R_I76Y |
| 344 | NGC PAM CP5 variant (S. pyogenes Cas9)_ABE8.10 | monomer_Y147R_Q154R_T166R |
| 345 | NGC PAM CP5 variant (S. pyogenes Cas9)_ABE8.11 | monomer_Y147T_Q154R |
| 346 | NGC PAM CP5 variant (S. pyogenes Cas9)_ABE8.12 | monomer_Y147T_Q154S |
| 347 | NGC PAM CP5 variant (S. pyogenes Cas9)_ABE8.13 | monomer_H123Y123H_Y147R_Q154R_I76Y |
| 348 | NGC PAM CP5 variant (S. pyogenes Cas9)_ABE7.10 | monomer_deletion at TadA7.10* residue 149 |
| 349 | NGC PAM CP5 variant (S. pyogenes Cas9)_ABE7.10 | monomer_deletion at TadA7.10* residue 150 |
| 350 | NGC PAM CP5 variant (S. pyogenes Cas9)_ABE7.10 | monomer_deletion at TadA7.10* residue 151 |
| 351 | NGC PAM CP5 variant (S. pyogenes Cas9)_ABE7.10 | monomer_deletion at TadA7.10* residue 152 |
| 352 | NGC PAM CP5 variant (S. pyogenes Cas9)_ABE7.10 | monomer_deletion at TadA7.10* residue 153 |
| 353 | NGC PAM CP5 variant (S. pyogenes Cas9)_ABE7.10 | monomer_deletion at TadA7.10* residue 154 |
| 354 | NGC PAM CP5 variant (S. pyogenes Cas9)_ABE7.10 | monomer_deletion at TadA7.10* residue 155 |
| 355 | NGC PAM CP5 variant (S. pyogenes Cas9)_ABE7.10 | monomer_deletion at TadA7.10* residue 156 |
| 356 | NGC PAM CP5 variant (S. pyogenes Cas9)_ABE7.10 | monomer_deletion at TadA7.10* residue 157 |
| 357 | NGC PAM CP5 variant (S. pyogenes Cas9)_ABE8.14 | heterodimer_TadA*7.10 + Y147T |
| 358 | NGC PAM CP5 variant (S. pyogenes Cas9)_ABE8.15 | heterodimer_TadA*7.10 + Y147R |
| 359 | NGC PAM CP5 variant (S. pyogenes Cas9)_ABE8.16 | heterodimer_TadA*7.10 + Q154S |
| 360 | NGC PAM CP5 variant (S. pyogenes Cas9)_ABE8.17 | heterodimer_TadA*7.10 + Y123H |
| 361 | NGC PAM CP5 variant (S. pyogenes Cas9)_ABE8.18 | heterodimer_TadA*7.10 + V82S |
| 362 | NGC PAM CP5 variant (S. pyogenes Cas9)_ABE8.19 | heterodimer_TadA*7.10 + T166R |
| 363 | NGC PAM CP5 variant (S. pyogenes Cas9)_ABE8.20 | heterodimer_TadA*7.10 + Q154R |
| 364 | NGC PAM CP5 variant (S. pyogenes Cas9)_ABE8.21 | heterodimer_Y147R_Q154R_Y123H |
| 365 | NGC PAM CP5 variant (S. pyogenes Cas9)_ABE8.22 | heterodimer_Y147R_Q154R_I76Y |
| 366 | NGC PAM CP5 variant (S. pyogenes Cas9)_ABE8.23 | heterodimer_Y147R_Q154R_T166R |
| 367 | NGC PAM CP5 variant (S. pyogenes Cas9)_ABE8.24 | heterodimer_Y147T_Q154R |
| 368 | NGC PAM CP5 variant (S. pyogenes Cas9)_ABE8.25 | heterodimer_Y147T_Q154S |
| 369 | NGC PAM CP5 variant (S. pyogenes Cas9)_ABE8.26 | heterodimer_H123Y123H_Y147R_Q154R_I76Y |
| 370 | NGC PAM CP5 variant (S. pyogenes Cas9)_ABE7.10 | heterodimer_deletion at TadA7.10* residue 149 |
| 371 | NGC PAM CP5 variant (S. pyogenes Cas9)_ABE7.10 | heterodimer_deletion at TadA7.10* residue 150 |
| 372 | NGC PAM CP5 variant (S. pyogenes Cas9)_ABE7.10 | heterodimer_deletion at TadA7.10* residue 151 |
| 373 | NGC PAM CP5 variant (S. pyogenes Cas9)_ABE7.10 | heterodimer_deletion at TadA7.10* residue 152 |
| 374 | NGC PAM CP5 variant (S. pyogenes Cas9)_ABE7.10 | heterodimer_deletion at TadA7.10* residue 153 |
| 375 | NGC PAM CP5 variant (S. pyogenes Cas9)_ABE7.10 | heterodimer_deletion at TadA7.10* residue 154 |
| 376 | NGC PAM CP5 variant (S. pyogenes Cas9)_ABE7.10 | heterodimer_deletion at TadA7.10* residue 155 |
| 377 | NGC PAM CP5 variant (S. pyogenes Cas9)_ABE7.10 | heterodimer_deletion at TadA7.10* residue 156 |
| 378 | NGC PAM CP5 variant (S. pyogenes Cas9)_ABE7.10 | heterodimer_deletion at TadA7.10* residue 157 |

### Example 2: Codon Optimization and NLS Choice for ABE8 Design

[0952] It has been established that Cas9 codon usage and nuclear localization sequence can dramatically alter genome editing efficiencies in eukaryotes (see e.g., Kim, S. et al., Rescue of high-specificity Cas9 variants using sgRNAs with matched 5′ nucleotides. Genome Biol 18, 218, doi:10.1186/s13059-017-1355-3 (2017); Mikami, M. et al., Comparison of CRISPR/Cas9 expression constructs for efficient targeted mutagenesis in rice. Plant Mol Biol 88, 561-572, doi:10.1007/s11103-015-0342-x (2015); Jinek, M. et al., RNA-programmed genome editing in human cells. Elife 2, e00471, doi:10.7554/eLife.00471 (2013)). The original Cas9n component of base editors contains six potential polyadenylation sites, leading to poor expression in eukaryotes (see e.g., Kim, S. et al., Rescue of high-specificity Cas9 variants using sgRNAs with matched 5′ nucleotides. Genome Biol 18, 218, doi:10.1186/s13059-017-1355-3 (2017); Komor, A. C. et al., Programmable editing of a target base in genomic DNA without double-stranded DNA cleavage. Nature 533, 420-424, doi:10.1038/nature17946 (2016); Gaudelli, N. M. et al. Programmable base editing of A*T to G*C in genomic DNA without DNA cleavage. Nature 551, 464-471, doi:10.1038/nature24644 (2017)). Replacing this with an extensively optimized codon sequence improves base editing efficiencies (see e.g., Cong, L. et al. Multiplex genome engineering using CRISPR/Cas systems. Science 339, 819-823, doi:10.1126/science.1231143 (2013); Koblan, L. W. et al. Improving cytidine and adenine base editors by expression optimization and ancestral reconstruction. Nat Biotechnol, doi:10.1038/nbt.4172 (2018); Zafra, M. P. et al. Optimized base editors enable efficient editing in cells, organoids and mice. Nat Biotechnol, doi:10.1038/nbt.4194 (2018)).

[0953] DNA on-target (FIG. 9A, 9B), DNA off-target (FIG. 9C, 9D) and RNA off-target (FIG. 9E) base editing frequencies associated with four ABE constructs were assessed, all of which contain a codon-optimized Cas9(D10A): i) ABE7.10, which has a single C-terminal BP-SV40 NLS; ii) monoABE7.10 which lacks the 5′ TadA wild-type portion of ABE7.10; iii) ABEmax, which contains codon-optimized TadA regions and two BPNLS sequences; and iv) ABEmax(-BPNLS), which has the TadA codon optimization as ABEmax but contains a single C-terminal BP-SV40 NLS.

[0954] All four constructs displayed remarkably similar on-target editing efficiencies, indicating that the NLS architecture and TadA codon optimization are not determining for on-target editing efficiency (FIG. 9A, 9B). The off-target profiles were also highly similar, but ABEmax displayed significantly greater DNA off-target editing (p=0.00027, Students' two-tailed T test) at one site when compared to ABE7.10 (FIG. 9C, 9D). ABEmax(-NBPNLS) displayed a 1.6-fold greater mean frequency of RNA off-target editing than ABE7.10 (FIG. 9E).

### Example 3: Superior Adenine Base Editors with Expanded Targeting Range

[0955] ABE is a molecular machine comprising an evolved E. coli tRNAARG modifying enzyme, TadA, covalently fused to a catalytically-impaired Cas9 protein (D10A nickase Cas9, nCas9) (FIGS. 7A and 7B). To overcome limitation of prior adenine base editors, the stringency of the bacterial selection system was increased by designing ABEs that must make three concurrent A•T to G•C reversion edits to survive antibiotic selection. In the prior ABE evolutions, TadA libraries were created via error-prone PCR. Contrastingly, a synthetic library of TadA alleles was utilized containing all 20 canonical amino acid substitutions at each position of TadA, with an average frequency of 1-2 nucleotide substitution mutations per library member. This chemical library enabled access to a greater sequence space than is achievable with error-prone PCR techniques.

[0956] About 300 clones were isolated and subsequently sequenced. From the resultant sequencing data, eight mutations were identified within TadA* that were enriched with high frequency (Tables 7 and 9). Six of the eight identified amino acid mutations required at least two nucleobase changes per codon, which were unobserved with the previous TadA error-prone libraries. Two of the enriched mutations alter residues proximal to the active site of adenine deamination (176 and V82) (FIG. 7C). In addition to the four previously reported mutations in the C-terminal alpha helix of TadA*7.10, two new mutations were observed within the same alpha-helix (Y147R and Q154R) (FIG. 7C). This highly mutated alpha-helix is necessary for robust product formation because upon truncation, base editing efficiency was substantially reduced (FIGS. 10A and 10B).

[0957] To test the activity of TadA* variants in mammalian cells, BE codon optimization and NLS orientation was utilized with the most favorable on- and off-target profile (see Example 2; FIGS. 9A-9E). The eight enriched TadA* mutations were incorporated into ABE7.10 in various combinations, yielding forty new ABE8 variants (Tables 7 and 9). ABE8 constructs were made where the TadA region of ABE is either heterodimeric fusion of an inactive (wild-type) and active (evolved) TadA* protomer or a single protomer of an engineered TadA*, resulting in about a 500 base-pair smaller editor. These architectural variants are referred to as ABE8.x-d and ABE8.x-m respectively (Tables 7 and 9).

[0958] First, these forty constructs were evaluated for their on-target DNA editing efficiencies relative to ABE7.10 across eight genomic sites containing target A bases in positions which range from 2 to 20 (where NGG PAM=positions 21, 22, 23) within the canonical 20-nt S. pyogenes protospacer (FIG. 11). The N-terminal wild-type TadA construct was not necessary for robust DNA editing using ABE8. Indeed, constructs containing the N-terminal, wild-type TadA (ABE8.x-d) perform similarly in terms of both editing window preference, total DNA editing outcome, and INDEL frequency relative to its economized architecture (ABE8.x-m) (FIG. 7D, FIG. 11, FIG. 12). Although intra-construct, TadA(wt):TadA*8 dimerization may not be necessary for ABE8 activity, it does not preclude the possibility of in trans TadA*8:TadA*8 dimerization occurring between ABE8 expressed base editors.

[0959] Across all sites tested, ABE8s result in about 1.5× higher editing at canonical positions (A5-A7) in the protospacer and about 3.2× higher editing at non-canonical positions (A3-A4, A8-A10) compared with ABE7.10 (FIG. 13). Fold differences vary between sequence of the target, position of the “A” within the target window and ABE8 construct identity (FIG. 7D, FIG. 11, FIG. 13). Overall, the median change in editing across all positions, in all sites tested is 1.94-fold relative to ABE7.10 (range 1.34-4.49).

[0960] Next, from the large ABE8 pool of forty constructs, a sub-set of ABE8 constructs (ABE8.8-m, ABE8.13-m, ABE8.17-m, ABE8.20-m, ABE8.8-d, ABE8.13-m, ABE8.17-d and ABE8.20-d) were selected to evaluate in greater detail. These constructs represent ABE8s with distinct differences in editing performance amongst the 8 genomic sites as determined through a hierarchical clustering analysis (FIG. 14). These ABE8s all significantly outperform ABE7.10 at all genomic sites tested (P-value=0.0006871, two-tailed Wilcoxon rank sum test) and encompass a variety of combinations of mutations identified from the ABE8 directed evolution campaign (FIG. 15 and FIG. 16).

[0961] Although ABE variants recognizing non-NGG PAMs have been described, editing efficiencies of these constructs are decreased in many instances when compared to outcomes observed with S. pyogenes Cas9 targeting NGG PAM sequences (see e.g., Huang, T. P. et al. Circularly permuted and PAM-modified Cas9 variants broaden the targeting scope of base editors. Nat Biotechnol 37, 626-631, doi:10.1038/s41587-019-0134-y (2019); Hua, K. et al., Expanding the base editing scope in rice by using Cas9 variants. Plant Biotechnol J, doi:10.1111/pbi.12993 (2018); Yang, L. et al., Increasing targeting scope of adenosine base editors in mouse and rat embryos through fusion of TadA deaminase with Cas9 variants. Protein Cell 9, 814-819, doi:10.1007/s13238-018-0568-x (2018)). To determine whether evolved deaminase also increases the editing efficiencies at target sites bearing non-NGG PAMs, ABE8 editors were created that replace S. pyogenes Cas9 with an engineered S. py. variant, NG-Cas9 (PAM: NG) (Nishimasu, H. et al. Engineered CRISPR-Cas9 nuclease with expanded targeting space. Science (2018)) or Staphylococcus aureus Cas9 (SaCas9, PAM: NNGRRT) (Ran, F. A. et al. In vivo genome editing using Staphylococcus aureus Cas9. Nature 520, 186-191, doi:10.1038/nature14299 (2015)). Median increases were observed in A•T to G•C editing frequencies of 1.6- and 2.0-fold, respectively, when comparing ABE8 variants to ABE7.10 for both SpCas9-NG (NG-ABE8.x-m/d) and SaCas9 (Sa-ABE8.x-m/d) (FIGS. 8A, 8B, and 17-20). Similar to SpCas9-ABE8, the greatest differences in editing efficiencies between ABE7.10 and ABE8 constructs for the non-NGG PAM variants are observed at target A positions located at the periphery of the preferred position in the editing window (S. pyogenes: positions 4-8; S. aureus: positions 6-13; see also Rees, H. A. & Liu, D. R., Base editing: precision chemistry on the genome and transcriptome of living cells. Nat Rev Genet 19, 770-788, doi:10.1038/s41576-018-0059-1 (2018)). ABE8 orthologs utilizing non-NGG PAMs broaden the targeting scope for efficient A base editing.

[0962] For applications where minimizing indel formation is necessary, the effect of replacing the catalytically impaired D10A nickase mutant of Cas9 with a catalytically “dead” version of Cas9 (D10A+H840A) (see Jinek, M. et al. A programmable dual-RNA-guided DNA endonuclease in adaptive bacterial immunity. Science 337, 816-821, doi:10.1126/science.1225829 (2012)) was explored in the core eight ABE8 constructs (“dC9-ABE8.x-m/d”). By replacing the nickase with dead Cas9 in ABEs, a >90% reduction in indel frequency was observed for dC9-ABE8 variants relative to ABE7.10 while maintaining a significantly higher (2.1-fold), on-target DNA editing efficiency (FIGS. 8C, 21, 22, 23A, and 23B). Although indels above background are observed, frequencies ranged only from 0.3-0.8% at sites tested. Encouragingly, dC9-ABE8 variants only have a median 14% reduction in on-target DNA editing efficiencies relative to canonical ABE8s.

[0963] Another class of undesired ABE-mediated genome edit at an on-target locus is an ABE-dependent cytosine to uracil (C•G to T•A) conversion (see Grunewald, J. et al., CRISPR DNA base editors with reduced RNA off-target and self-editing activities. Nat Biotechnol 37, 1041-1048, doi:10.1038/s41587-019-0236-6 (2019); Lee, C. et al. CRISPR-Pass: Gene Rescue of Nonsense Mutations Using Adenine Base Editors. Mol Ther 27, 1364-1371, doi:10.1016/j.ymthe.2019.05.013 (2019)). At the eight target sites tested, the 95^{th} percentile of C-to-T editing was measured to be 0.45% with ABE8 variants and 0.15% with ABE7.10-d or -m, indicating that on-target cytosine deamination with ABEs can occur but the frequencies are generally very low (FIG. 24). Together, these data indicate that ABE8s retain high specificity for A-to-G conversion compared to other, often undesirable byproducts.

### Example 4: DNA On-Target and sgRNA-Dependent DNA Off-Target Editing by ABE8 Constructs Improve Specificity for DNA

[0964] As with all base editors, ABE8s have the potential to act at off-target loci in the genome and transcriptome (see e.g., Gaudelli, N. M. et al. Programmable base editing of A*T to G*C in genomic DNA without DNA cleavage. Nature 551, 464-471, doi:10.1038/nature24644 (2017); Komor, A. C., et al., Programmable editing of a target base in genomic DNA without double-stranded DNA cleavage. Nature 533, 420-424, doi:10.1038/nature17946 (2016); Grunewald, J. et al. CRISPR DNA base editors with reduced RNA off-target and self-editing activities. Nat Biotechnol 37, 1041-1048, doi:10.1038/s41587-019-0236-6 (2019); Rees, H. A., et al., Analysis and minimization of cellular RNA editing by DNA adenine base editors. Sci Adv 5, eaax5717, doi:10.1126/sciadv.aax5717 (2019); Rees, H. A. et al. Improving the DNA specificity and applicability of base editing through protein engineering and protein delivery. Nat Commun 8, 15790, doi:10.1038/ncomms15790 (2017); Jin, S. et al. Cytosine, but not adenine, base editors induce genome-wide off-target mutations in rice. Science 364, 292-295, doi:10.1126/science.aaw7166 (2019); Zuo, E. et al. Cytosine base editor generates substantial off-target single-nucleotide variants in mouse embryos. Science 364, 289-292, doi:10.1126/science.aav9973 (2019); Lee, H. K., et al., Cytosine but not adenine base editor generates mutations in mice. Biorxiv, doi:doi.org/10.1101/731927 (2019); Grunewald, J. et al. Transcriptome-wide off-target RNA editing induced by CRISPR-guided DNA base editors. Nature 569, 433-437, doi:10.1038/s41586-019-1161-z (2019); Zhou, C. et al. Off-target RNA mutation induced by DNA base editing and its elimination by mutagenesis. Nature 571, 275-278, doi:10.1038/s41586-019-1314-0 (2019)).

[0965] Base editing at four on-target (FIGS. 25A and 25B) and twelve previously identified sgRNA-associated off-target loci in genomic DNA (Tsai, S. Q. et al. GUIDE-seq enables genome-wide profiling of off-target cleavage by CRISPR-Cas nucleases. Nat Biotechnol 33, 187-197, doi:10.1038/nbt.3117 (2015)) (FIGS. 25E and 25F) were measured, all of which were confirmed to be true Cas9 off-target loci in HEK293T cells (FIG. 26). As expected from their increased activity at on-target loci, ABE8 constructs exhibit 3-6-fold greater DNA off-target editing frequencies than ABE7.10. Whilst this is a caveat for use of ABE8 constructs, careful choice and analysis of the sgRNA can substantially decrease sgRNA-dependent off-target editing (see Tsai, S. Q. et al. GUIDE-seq enables genome-wide profiling of off-target cleavage by CRISPR-Cas nucleases. Nat Biotechnol 33, 187-197, doi:10.1038/nbt.3117 (2015); Yeh, W. H., et al., In vivo base editing of post-mitotic sensory cells. Nat Commun 9, 2184, doi:10.1038/s41467-018-04580-3 (2018)). For applications requiring use of promiscuous sgRNAs, installation of the DNA- and RNA-specificity enhancing V106W mutation (Rees, H. A., Wilson, C., Doman, J. L. & Liu, D. R. Analysis and minimization of cellular RNA editing by DNA adenine base editors. Sci Adv 5, eaax5717, doi:10.1126/sciadv.aax5717 (2019)) into the TadA domain of ABE8.17m can decrease the DNA off-target editing 2.6-fold while maintaining levels of on-target editing exceeding those of ABE7.10 (FIGS. 25C, 25D, 25G and 25H).

[0966] To measure the sgRNA-independent off-target activity of ABE8s, targeted amplification and high throughput sequencing of cellular RNAs was performed in HEK293T cells treated with ABEs (see Gaudelli, N. M. et al. Programmable base editing of A*T to G*C in genomic DNA without DNA cleavage. Nature 551, 464-471, doi:10.1038/nature24644 (2017); Rees, H. A., et al., Analysis and minimization of cellular RNA editing by DNA adenine base editors. Sci Adv 5, eaax5717, doi:10.1126/sciadv.aax5717 (2019)). In this assay, ABE8s displayed between 2.3-5.3-fold greater mean frequencies of cellular RNA adenosine deamination as compared to ABE7.10 (FIG. 25A).

[0967] To mitigate spurious RNA off target editing, previously published mutations (Grunewald, J. et al. CRISPR DNA base editors with reduced RNA off-target and self-editing activities. Nat Biotechnol 37, 1041-1048, doi:10.1038/s41587-019-0236-6 (2019); Rees, H. A., et al., Analysis and minimization of cellular RNA editing by DNA adenine base editors. Sci Adv 5, eaax5717, doi:10.1126/sciadv.aax5717 (2019); Grunewald, J. et al. Transcriptome-wide off-target RNA editing induced by CRISPR-guided DNA base editors. Nature 569, 433-437, doi:10.1038/s41586-019-1161-z (2019); Zhou, C. et al. Off-target RNA mutation induced by DNA base editing and its elimination by mutagenesis. Nature 571, 275-278, doi:10.1038/s41586-019-1314-0 (2019)) were installed into the TadA portion of the deaminase enzyme into ABE8.17-m to evaluate reductions in off-target editing frequencies. All of these mutations decreased the on-target editing frequencies of ABE8.17-m to differing extents, with V106W and F148A impairing ABE8 the least (FIGS. 25C and 25D). Of these, only V106W was able to substantially reduce the level of off-target RNA and DNA editing (FIG. 25B). Thus, the inclusion of the V106W mutation to ABE8 is applicable where transient perturbation of the cellular transcriptome must be avoided, or for use with promiscuous sgRNAs.

### Example 5: Adenine Base Editors for the Treatment of Hematological Disorders

[0968] ABE8 constructs were evaluated in human hematopoietic stem cells (HSC). Ex vivo manipulation and/or editing of HSCs prior to administration to patients as a cell therapy is a promising approach for the treatment of hematological disorders. It has been previously demonstrated that ABEs can introduce a T to C substitution at the −198 position of the promoter region of HBG1/2 (Gaudelli, N. M. et al. Programmable base editing of A*T to G*C in genomic DNA without DNA cleavage. Nature 551, 464-471, doi:10.1038/nature24644 (2017)). This naturally occurring allele yields Hereditary Persistence of Fetal Hemoglobin (HPFH) resulting in increased levels of γ-globin into adulthood, which can mitigate the defects in β-globin seen in sickle cell disease and β-thalassemia (Wienert, B. et al. KLF1 drives the expression of fetal hemoglobin in British HPFH. Blood 130, 803-807, doi:10.1182/blood-2017-02-767400 (2017)). With the goal of reproducing the HPFH phenotype and evaluating the clinical relevance of ABE8, CD34+ hematopoietic stem cells were isolated from two donors and transfected with mRNA encoding ABE8 editors and end-modified sgRNA placing the target A at position 7 within the protospacer.

[0969] The average ABE8 editing efficiencies at the −198 HBG1/2 promoter target site were 2-3× higher than either ABE7.10 construct at early time points (48 h), and 1.3-2-fold higher than either ABE7.10 at the later time (144 h) (FIG. 27A, FIG. 28, FIG. 29). These kinetic distinctions are clinically important for ex vivo therapies in which cell culturing must be kept to a minimum prior to administration of cell therapy.

[0970] Next, the amount of γ-globin protein produced following ABE treatment and erythrocyte differentiation was quantified by UPLC (FIGS. 30-50). A 3.5-fold average increase in % γ-globin/α-globin expression in erythrocytes derived from the ABE8 treatment groups was observed when compared to mock treated cells and about a 1.4-fold increase when comparing ABE8.13-d to levels achieved with ABE7.10-m/d (FIG. 27B). It is predicted that 20% HbF is required to ameliorate symptoms of sickle cell disease and β-thalassemia patients likely require even higher minimum levels (see e.g., Canver, M. C. & Orkin, S. H. Customizing the genome as therapy for the beta-hemoglobinopathies. Blood 127, 2536-2545, doi:10.1182/blood-2016-01-678128 (2016); Fitzhugh, C. D. et al. At least 20% donor myeloid chimerism is necessary to reverse the sickle phenotype after allogeneic HSCT. Blood 130, 1946-1948, doi:10.1182/blood-2017-03-772392 (2017)). The γ-globin levels observed following ABE8 treatment surpassed this threshold.

[0971] Overall, ABE8s recreated a naturally occurring hereditary persistence of fetal hemoglobin (HPFH) allele at the promoter of the γ-globin genes HBG1 and HBG2, achieving editing efficiencies of up to 60% in human CD34+ cell cultures and a corresponding upregulation of gamma globin expression in differentiated erythrocytes.

### Example 6: Complementary Base Editing Approaches for the Treatment of Sickle Cell Disease and Beta Thalassemia

[0972] Sickle cell disease (SCD) and Beta thalassemia are disorders of beta globin production and function that lead to severe anemia and significant disease complications across a multitude of organ systems. Autologous transplantation of hematopoietic stem cells engineered through the upregulation of fetal hemoglobin (HbF) or correction of the beta globin gene have the potential to reduce disease burden in patients with beta hemoglobinopathies. Base editing is a recently developed technology that enables precise modification of the genome without the introduction of double strand DNA breaks.

[0973] Gamma globin gene promoters were comprehensively screened with cytosine and adenine base editors (ABE) for the identification of alterations that would derepress HbF. Three regions were identified that significantly upregulated HbF, and the most effective nucleotide residue conversions are supported by natural variation seen in patients with hereditary persistence of fetal hemoglobin (HPFH). ABEs have been developed that significantly increase the level of HbF following nucleotide conversion at key regulatory motifs within the HBG1 and HBG2 promoters. CD34+ hematopoietic stem and progenitor cells (HSPC) were purified at clinical scale and edited using a process designed to preserve self-renewal capacity. Editing at two independent sites with different ABEs reached 94 percent and resulted in up to 63 percent gamma globin by UPLC (FIGS. 51A-51E). The levels of HbF observed should afford protection to the majority of SCD and Beta thalassemia patients based on clinical observations of HPFH and non-interventional therapy that links higher HbF dosage with milder disease (Ngo et al., 2011 Brit J Hem; Musallam et al., 2012 Blood).

[0974] Directly correcting the Glu6Val mutation of SCD has been a recent goal of genetic therapies designed for the SCD population. Current base editing technology cannot yet convert mutations like those that result from the A-T transversion in sickle beta globin; however, ABE variants have been designed to recognize and edit the opposite stranded adenine residue of valine. This results in the conversion of valine to alanine and the production of a naturally occurring variant known as Hb G-Makassar. Beta globin with alanine at this position does not contribute to polymer formation, and patients with Hb G-Makassar present with normal hematological parameters and red blood cell morphology. SCD patient fibroblasts edited with these ABE variants achieve up to 70 percent conversion of the target adenine (FIG. 52A). CD34 cells from healthy donors were then edited with a lead ABE variant, targeting a synonymous mutation in an adjacent proline that resides within the editing window and serves as a proxy for editing the SCD mutation. The average editing frequency was 40 percent (FIG. 52B). Donor myeloid chimerism documented at these levels in the allogeneic transplant setting exceeds the 20 percent that is required for reversing the sickle phenotype (Fitzhugh et al, 2017 Blood).

### Example 7: Materials and Methods

### General Methods:

[0975] All cloning was conducted via USER enzyme (New England Biolabs) cloning methods (see Geu-Flores et al., USER fusion: a rapid and efficient method for simultaneous fusion and cloning of multiple PCR products. Nucleic Acids Res 35, e55, doi:10.1093/nar/gkm106 (2007)) and templates for PCR amplification were purchased as bacterial or mammalian codon optimized gene fragments (GeneArt). Vectors created were transformed into Mach T1^{R} Competent Cells (Thermo Fisher Scientific) and maintained at −80 C for long-term storage. All primers used in this work were purchased from Integrated DNA Technologies and PCRS were carried out using either Phusion U DNA Polymerase Green MultiPlex PCR Master Mix (ThermoFisher) or Q5 Hot Start High-Fidelity 2× Master Mix (New England Biolabs). All plasmids used in this work were freshly prepared from 50 mL of Machl culture using ZymoPURE Plasmid Midiprep (Zymo Research Corporation) which involves an endotoxin removal procedure. Molecular biology grade, Hyclone water (GE Healthcare Life Sciences) was used in all assays, transfections, and PCR reactions to ensure exclusion of DNAse activity.

[0976] Amino acid sequences of sgRNAs used for Hek293T mammalian cell transfection are provided in Table 15 below. The 20-nt target protospacer is shown in bold font. When a target DNA sequence did not start with a ‘G,’ a ‘G’ was added to the 5′ end of the primer since it has been established that the human U6 promoter prefers a ‘G’ at the transcription start site (see Cong, L. et al., Multiplex genome engineering using CRISPR/Cas systems. Science 339, 819-823, doi:10.1126/science.1231143 (2013)). The pFYF sgRNA plasmid described previously was used as a template for PCR amplification.

TABLE 15
Sequences of sgRNAs used for Hek293T mammalian cell transfection.

| Site | RNA protospacer sequence | Cas9 scaffold | PAM |
|---|---|---|---|
| 1 | GAACACAAAGCAUAGACUGC (SEQ | A pyogenes | NGG |
| | ID NO: 310) | | |
| 2 | GGGAAAGACCCAGCAUCCGU (SEQ | S. pyogenes | NGG |
| | ID NO: 311) | | |
| 3 | GCUCCCAUCACAUCAACCGG(SEQ | S. pyogenes | NGG |
| | ID NO: 312) | | |
| 4 | GGUGAGUGAGUGUGUGCGUG (SEQ | S. pyogenes | NGG |
| | ID NO: 313) | | |
| 5 | GGCUUCAGGUUCUAAAUGAG (SEQ | S. pyogenes | NGG |
| | ID NO: 314) | | |
| 6 | GCAGAGAGUCGCCGUCUCCA (SEQ | S. pyogenes | NGG |
| | ID NO: 315) | | |
| 7 | GUGUAAGACCUCAAAAGCAC (SEQ | S. pyogenes | NGG |
| | ID NO: 316) | | |
| 8 | GAUGAGAAGGAGAAGUUCUU (SEQ | 5. pyogenes | NGG |
| | ID NO: 317) | | |
| 9 | GAGGACAAAGUACAAACGGC (SEQ | S. pyogenes | AGA |
| | ID NO: 318) | | |
| 10 | GCCACCACAGGGAAGCUGGG (SEQ | S. pyogenes | TGA |
| | ID NO: 319) | | |
| 11 | GCUCUCAGGCCCUGUCCGCA (SEQ | S. pyogenes | CGT |
| | ID NO: 320) | | |
| 12 | GAGCAAAUACCAGAGAUAAG (SEQ | S. pyogenes | AGA |
| | ID NO: 321) | | |
| 13 | GAUCAGGAAAUAGAGCCACA (SEQ | S. pyogenes | GGC |
| | ID NO: 322) | | |
| 14 | GCCCAUCCCUGAGUCCAGCG(SEQ | S. pyogenes | AGC |
| | ID NO: 323) | | |
| 15 | GAACACGAAGACAUCUGAAGGUA | S. aureus | TTGAAT |
| | (SEQ ID NO: 324) | | |
| 16 | GAUUUACAGCCUGGCCUUUGGGG | S. aureus | TCGGGT |
| | (SEQ ID NO: 325) | | |
| 17 | GGAGAGAAAGAGAAGUUGAUUG | S. aureus | ATGGGT |
| | (SEQ ID NO: 326) | | |
| 18 | GAGGGUGAGGGAUGAGAUAAUG | S. aureus | ATGAGT |
| | (SEQ ID NO: 327) | | |
| 19 | GGUGGAGGAGGGUGCAUGGGGU | S. aureus | CAGAAT |
| | (SEQ ID NO: 328) | | |
| 20 | GCUGUUGCAUGAGGAAAGGGAC | S. aureus | TAGAGT |
| | (SEQ ID NO: 329) | | |
| HEK2 | GAACACAAAGCAUAGACUGC (SEQ | S. pyogenes | CGG |
| | ID NO: 310) | | |
| HEK3 | GGCCCAGACUGAGCACGUGA (SEQ | S. pyogenes | TGG |
| | ID NO: 330) | | |
| HEK4 | GGCACUGCGGCUGGAGGUGG (SEQ | S. pyogenes | GGG |
| | ID NO: 331) | | |
| LDLR | GCAGAGCACUGGAAUUCGUCA | S. pyogenes | GGG |
| | (SEQ ID NO: 332) | | |

sgRNA scaffold sequences are as follows:

S. pyogenes.
(SEQ ID NO: 333)
GUUUUAGAGCUAGAAAUAGCAAGUUAAAAUAAGGCUAGUCCGUUAUCAA
CUUGAAAAAGUGGCACCGAGUCGGUGC
S. aureus.
(SEQ ID NO: 334)
GUUUUAGUACUCUGUAAUGAAAAUUACAGAAUCUACUAAAACAAGGCAA
AAUGCCGUGUUUAUCUCGUCAACUUGUUGGCGAGA

### Generation of Input Bacterial TadA* Libraries for Directed Evolution

[0977] The TadA*8.0 library was designed to encode all 20 amino acids at each amino acid position in the TadA*7.10 open reading frame (Gaudelli, N. M. et al., Programmable base editing of A*T to G*C in genomic DNA without DNA cleavage. Nature 551, 464-471, doi:10.1038/nature24644 (2017)). Each TadA*8.0 library member contained about 1-2 new coding mutations and was chemically synthesized and purchased from Ranomics Inc (Toronto, Canada). The TadA*8.0 library was PCR amplified with Phusion U Green MultiPlex PCR Master Mix and USER-assembled into a bacterial vector optimized for ABE directed evolution (Gaudelli, N. M. et al., Programmable base editing of A*T to G*C in genomic DNA without DNA cleavage. Nature 551, 464-471, doi:10.1038/nature24644 (2017)).

### Bacterial Evolution of TadA Variants

[0978] Directed evolution of ABE containing the TadA*8 library was conducted as previously described (Gaudelli, N. M. et al., Programmable base editing of A*T to G*C in genomic DNA without DNA cleavage. Nature 551, 464-471, doi:10.1038/nature24644 (2017)) with the following changes: i) E. coli 10 betas (New England Biolabs) were used as the evolution host; and ii) survival on kanamycin relied on correction of three genetic inactivating components (e.g. survival required reversion of two stop mutations and one active site mutation in kanamycin). The kanamycin resistance gene sequence contains selection mutations for ABE8 evolution. After overnight co-culturing of selection plasmid and editor in 10 beta host cells, the library cultures were plated on 2×YT-agar medium supplemented with plasmid maintenance antibiotic and increasing concentrations of selection antibiotic, kanamycin (64-512 μg/mL). Bacteria were allowed to grow for 1 day and the TadA*8 portion of the surviving clones were Sanger sequenced after enrichment. Identified TadA*8 mutations of interest were then were then incorporated into mammalian expression vector via USER assembly.

### General HEK293T and RPMI-8226 Mammalian Culture Conditions

[0979] Cells were cultured at 37° C. with 5% CO₂. HEK293T cells [CLBTx013, American Type Cell Culture Collection (ATCC)] were cultured in Dulbecco's modified Eagles medium plus Glutamax (10566-016, Thermo Fisher Scientific) with 10% (v/v) fetal bovine serum (A31606-02, Thermo Fisher Scientific). RPMI-8226 (CCL-155, ATCC) cells were cultured in RPMI-1640 medium (Gibco) with 10% (v/v) fetal bovine serum (Gibco). Cells were tested negative for mycoplasma after receipt from supplier.

Hek293T Plasmid Transfection and gDNA Extraction

[0980] HEK293T cells were seeded onto 48-well Poly-D-Lysine treated BioCoat plates (Corning) at a density of 35,000 cells/well and transfected 18-24 hours after plating. Cells were counted using a NucleoCounter NC-200 (Chemometec). To these cells were added 750 ng of base editor or nuclease control, 250 ng of sgRNA, and 10 ng of GFP-max plasmid (Lonza) diluted to 12.5 μL total volume in Opti-MEM reduced serum media (ThermoFisher Scientific). The solution was combined with 1.5 μl of Lipofectamine 2000 (ThermoFisher) in 11 μl of Opti-MEM reduced serum media and left to rest at room temperature for 15 min. The entire 25 μl mixture was then transferred to the pre-seeded Hek293T cells and left to incubate for about 120 h. Following incubation, media was aspirated and cells were washed two times with 250 μL of 1×PBS solution (ThermoFisher Scientific) and 100 μl of freshly prepared lysis buffer was added (100 mM Tris-HCl, pH 7.0, 0.05% SDS, 25 μg/mL Proteinase K (Thermo Fisher Scientific). Transfection plates containing lysis buffer were incubated at 37° C. for 1 hour and the mixture was transferred to a 96-well PCR plate and heated at 80° C. for 30 min.

### Analysis of DNA and RNA Off-Target Editing for ABE Architecture and ABE8 Constructs

[0981] HEK293T cells were plated on 48-well poly-D-lysine coated plates (Corning) 16 to 20 hours before lipofection at a density of 30,000 cells per well in DMEM+Glutamax medium (Thermo Fisher Scientific) without antibiotics. 750 ng nickase or base editor expression plasmid DNA was combined with 250 ng of sgRNA expression plasmid DNA in 15 μl OPTIMEM+Glutamax. This was combined with 10 μl of lipid mixture, comprising 1.5 μl Lipofectamine 2000 and 8.5 μl OPTIMEM+Glutamax per well. Cells were harvested 3 days after transfection and either DNA or RNA was harvested. For DNA analysis, cells were washed once in 1×PBS, and then lysed in 100 μl QuickExtract™ Buffer (Lucigen) according to the manufacturer's instructions. For RNA harvest, the MagMAX™ mirVana™ Total RNA Isolation Kit (Thermo Fisher Scientific) was used with the KingFisher™ Flex Purification System according to the manufacturer's instructions.

[0982] Targeted RNA sequencing was performed largely as previously described (see Rees, H. A. et al., Analysis and minimization of cellular RNA editing by DNA adenine base editors. Sci Adv 5, eaax5717, doi:10.1126/sciadv.aax5717 (2019)). cDNA was prepared from the isolated RNA using the SuperScript IV One-Step RT-PCR System with EZDnase (Thermo Fisher Scientific) according to the manufacturer's instructions. The following program was used: 58° C. for 12 min; 98° C. for 2 min; followed by PCR cycles which varied by amplicon: for CTNNB1 and IP90: 32 cycles of [98° C. for 10 sec; 60° C. for 10 sec; 72° C. for 30 sec] and for RSL1D135 cycles of [98° C. for 10 sec; 58° C. for 10 sec; 72° C. for 30 sec]. No RT controls were run concurrently with the samples. Following the combined RT-PCR, amplicons were barcoded and sequenced using an Illumina Miseq as described above. The first 125 nt in each amplicon, beginning at the first base after the end of the forward primer in each amplicon, was aligned to a reference sequence and used for analysis of mean and maximum A-to-I frequencies in each amplicon (FIGS. 53A and 53B).

[0983] Off-target DNA sequencing was performed using previously published primers (see Komor, A. C. et al., Programmable editing of a target base in genomic DNA without double-stranded DNA cleavage. Nature 533, 420-424, doi:10.1038/nature17946 (2016); Rees, H. A. et al., Analysis and minimization of cellular RNA editing by DNA adenine base editors. Sci Adv 5, eaax5717, doi:10.1126/sciadv.aax5717 (2019)) listed in Table 16 below using a two-step PCR and barcoding method to prepare samples for sequencing using Illumina Miseq sequencers as above.

TABLE 16
HTS Primers used to amplify genomic sites:

| Primer Name | Sequence |
|---|---|
| fwd_site_1 | ACACTCTTTCCCTACACGACGCTCTTCCGATCTNNNNCCAGCCCCATCTGTCAAACT |
| | (SEQ ID NO: 335) |
| rev_site_1 | TGGAGTTCAGACGTGTGCTCTTCCGATCTTGAATGGATTCCTTGGAAACAATGA |
| | (SEQ ID NO: 336) |
| fwd_site_2 | ACACTCTTTCCCTACACGACGCTCTTCCGATCTNNNNTGAGGGAGAGCCGTGTAGTT |
| | (SEQ ID NO: 337) |
| rev_site_2 | TGGAGTTCAGACGTGTGCTCTTCCGATCTGCCTCTCAAAGTGCTGGGAT (SEQ ID |
| | NO: 338) |
| fwd_site_3 | ACACTCTTTCCCTACACGACGCTCTTCCGATCTNNNNCCATCAGGCTCTCAGCTCAG |
| | (SEQ ID NO: 339) |
| rev_site_3 | TGGAGTTCAGACGTGTGCTCTTCCGATCTCTCGTGGGTTTGTGGTTGC (SEQ ID |
| | NO: 340) |
| fwd_site_4 | ACACTCTTTCCCTACACGACGCTCTTCCGATCTNNNNGCCCATTCCCTCTTTAGCCA |
| | (SEQ ID NO: 341) |
| rev_site_4 | TGGAGTTCAGACGTGTGCTCTTCCGATCTGAGCCGTTCCCTCTTTGCTA (SEQ ID |
| | NO: 342) |
| fwd_site_5 | ACACTCTTTCCCTACACGACGCTCTTCCGATCTNNNNAACCTGTGTGACACTTGGCA |
| | (SEQ ID NO: 343) |
| rev_site_5 | TGGAGTTCAGACGTGTGCTCTTCCGATCTGTCTGGCCCAAGATCACACA (SEQ ID |
| | NO: 344) |
| fwd_site_6 | ACACTCTTTCCCTACACGACGCTCTTCCGATCTNNNCACGGATAAAGACGCTGGGA |
| | (SEQ ID NO: 345) |
| rev_site_6 | TGGAGTTCAGACGTGTGCTCTTCCGATCTGGGGTCCCAGGTGCTGAC (SEQ ID |
| | NO: 346) |
| fwd_site_7 | ACACTCTTTCCCTACACGACGCTCTTCCGATCTNNNTTGATTGTCTCCTTTGCCGC |
| | (SEQ ID NO: 347) |
| rev_site_7 | TGGAGTTCAGACGTGTGCTCTTCCGATCTTGACCCAGTGTTTGATAGATCAGT |
| | (SEQ ID NO: 348) |
| fwd_site_8 | ACACTCTTTCCCTACACGACGCTCTTCCGATCTNNNCACCCCTTCAGTCCATGCTT |
| | (SEQ ID NO: 349) |
| rev_site_8 | TGGAGTTCAGACGTGTGCTCTTCCGATCTTCTGATGGGGAGGAACGAGT (SEQ ID |
| | NO: 350) |
| fwd_site_9 | ACACTCTTTCCCTACACGACGCTCTTCCGATCTNNNNCAGCTCAGCCTGAGTGTTGA |
| | (SEQ ID NO: 351) |
| rev_site_9 | TGGAGTTCAGACGTGTGCTCTTCCGATCTGCCCACCCTAGTCATTGGAG (SEQ ID |
| | NO: 352) |
| fwd_site_10 | ACACTCTTTCCCTACACGACGCTCTTCCGATCTNNNNGTCAGAGGGACACACTGTGG |
| | (SEQ ID NO: 353) |
| rev_site_10 | TGGAGTTCAGACGTGTGCTCTTCCGATCTCACACTCACTCACCCACACA (SEQ ID |
| | NO: 354) |
| fwd_site_11 | ACACTCTTTCCCTACACGACGCTCTTCCGATCTNNNNTGTGTGGGTGAGTGAGTGTG |
| | (SEQ ID NO: 355) |
| rev_site_11 | TGGAGTTCAGACGTGTGCTCTTCCGATCTCACCAAGGTTCACAGCCTGA (SEQ ID |
| | NO: 356) |
| fwd_site_12 | ACACTCTTTCCCTACACGACGCTCTTCCGATCTNNNNTTGTCTCTGCCTGTAGCTGC |
| | (SEQ ID NO: 357) |
| rev_site_12 | TGGAGTTCAGACGTGTGCTCTTCCGATCTCGCTCTGGGCTTCATCTTCA (SEQ ID |
| | NO: 358) |
| fwd_site_13 | ACACTCTTTCCCTACACGACGCTCTTCCGATCTNNNNTGGGATTATGGGTGTGAGCC |
| | (SEQ ID NO: 359) |
| rev_site_13 | TGGAGTTCAGACGTGTGCTCTTCCGATCTTGCCTTCCTCCTCTCTCTCC (SEQ ID |
| | NO: 360) |
| fwd_site_14 | ACACTCTTTCCCTACACGACGCTCTTCCGATCTNNNNTGCAGACCAGATTCGGAGAA |
| | (SEQ ID NO: 361) |
| rev_site_14 | TGGAGTTCAGACGTGTGCTCTTCCGATCTGTTCAGTTTCCAGGGGGTCC (SEQ ID |
| | NO: 362) |
| fwd_site_15 | ACACTCTTTCCCTACACGACGCTCTTCCGATCTNNNNTCCGCACAGCCTTAGTTCAA |
| | (SEQ ID NO: 363) |
| rev_site_15 | TGGAGTTCAGACGTGTGCTCTTCCGATCTAACTTGAAGAGACGGCAGCA (SEQ ID |
| | NO: 364) |
| fwd_site_16 | ACACTCTTTCCCTACACGACGCTCTTCCGATCTNNNNCCCCCAGCTACAGAAAGGTC |
| | (SEQ ID NO: 365) |
| rev_site_16 | TGGAGTTCAGACGTGTGCTCTTCCGATCTATTTCCACCGCAAAATGGCC (SEQ ID |
| | NO: 366) |
| fwd_site_17 | ACACTCTTTCCCTACACGACGCTCTTCCGATCTNNNNTCACTTCAGCCCAGGAGTAT |
| | (SEQ ID NO: 367) |
| rev_site_17 | TGGAGTTCAGACGTGTGCTCTTCCGATCTTGTGTATGGTGAGAGGTAGGGA (SEQ |
| | ID NO: 368) |
| fwd_site_18 | ACACTCTTTCCCTACACGACGCTCTTCCGATCTNNNNGTCTGAGGTCACACAGTGGG |
| | (SEQ ID NO: 369) |
| rev_site_18 | TGGAGTTCAGACGTGTGCTCTTCCGATCTCTGAGAGCAGGGACCACATC (SEQ ID |
| | NO: 370) |
| fwd_site_19 | ACACTCTTTCCCTACACGACGCTCTTCCGATCTNNNNGGGAGGTGGAGAGAGGATGT |
| | (SEQ ID NO: 371) |
| rev_site_19 | TGGAGTTCAGACGTGTGCTCTTCCGATCTACTCTTCCTGAGGTCTAGGAACCCG |
| | (SEQ ID NO: 372) |
| fwd_site_20 | ACACTCTTTCCCTACACGACGCTCTTCCGATCTNNNNCCCTGTTCCTAAAGCCCACC |
| | (SEQ ID NO: 373) |
| rev_site_20 | TGGAGTTCAGACGTGTGCTCTTCCGATCTACTCTCTGGTTCTGTTTGTGGCCA |
| | (SEQ ID NO: 374) |
| fwd_CTNNB1 | ACACTCTTTCCCTACACGACGCTCTTCCGATCTNNNNATTTGATGGAGTTGGACATG |
| | GCC (SEQ ID NO: 375) |
| rev_CTNNB1 | TGGAGTTCAGACGTGTGCTCTCCAGCTACTTGTTCTTGAGTGAAGG (SEQ ID |
| | NO: 376) |
| fwd_RSL1D1 | ACACTCTTTCCCTACACGACGCTCTTCCGATCTNNNNTGGCTTTCCAAATCAGTGGG |
| | TC (SEQ ID NO: 377) |
| rev_RSL1D1 | TGGAGTTCAGACGTGTGCTCTTCCGATCTCTCATAAGCTTAGACCAACAAGC (SEQ |
| | ID NO: 378) |
| fwd_IP90 | ACACTCTTTCCCTACACGACGCTCTTCCGATCTNNNNCTGGTTGACCAATCTGTGGT |
| | G (SEQ ID NO: 379) |
| rev_IP90 | TGGAGTTCAGACGTGTGCTCTCTGCGTCTGGATCAGGTACG (SEQ ID NO: |
| | 380) |
| fwd_HEK293_ | ACACTCTTTCCCTACACGACGCTCTTCCGATCTNNNNGTGTGGAGAGTGAGTAAGCC |
| site2_off1 | A (SEQ ID NO: 381) |
| rev_HEK293_ | TGGAGTTCAGACGTGTGCTCTTCCGATCTACGGTAGGATGATTTCAGGCA (SEQ |
| siite2_off1 | ID NO: 382) |
| fwd_HEK293_ | ACACTCTTTCCCTACACGACGCTCTTCCGATCTNNNNCACAAAGCAGTGTAGCTCAG |
| site2_off2 | G (SEQ ID NO: 383) |
| rev_HEK293_ | TGGAGTTCAGACGTGTGCTCTTCCGATCTTTTTTGGTACTCGAGTGTTATTCAG |
| site2_off2 | (SEQ ID NO: 384) |
| fwd_HEK293_ | ACACTCTTTCCCTACACGACGCTCTTCCGATCTNNNNTCCCCTGTTGACCTGGAGAA |
| site3_off1 | (SEQ ID NO: 385) |
| rev_HEK293_ | TGGAGTTCAGACGTGTGCTCTTCCGATCTCACTGTACTTGCCCTGACCA (SEQ ID |
| site3_off1 | NO: 386) |
| fwd_HEK293_ | ACACTCTTTCCCTACACGACGCTCTTCCGATCTNNNNTTGGTGTTGACAGGGAGCAA |
| site3_off2 | (SEQ ID NO: 387) |
| rev_HEK293_ | TGGAGTTCAGACGTGTGCTCTTCCGATCTCTGAGATGTGGGCAGAAGGG (SEQ ID |
| site3_off2 | NO: 388) |
| fwd_HEK293_ | ACACTCTTTCCCTACACGACGCTCTTCCGATCTNNNNTGAGAGGGAACAGAAGGGCT |
| site3_off3 | (SEQ ID NO: 389) |
| rev_HEK293_ | TGGAGTTCAGACGTGTGCTCTTCCGATCTGTCCAAAGGCCCAAGAACCT (SEQ ID |
| site3_off3 | NO: 390) |
| fwd_HEK293_ | ACACTCTTTCCCTACACGACGCTCTTCCGATCTNNNNTCCTAGCACTTTGGAAGGTC |
| site3_off4 | G (SEQ ID NO: 391) |
| rev_HEK293_ | TGGAGTTCAGACGTGTGCTCTTCCGATCTGCTCATCTTAATCTGCTCAGCC (SEQ |
| site3_off4 | ID NO: 392) |
| fwd_HEK293_ | ACACTCTTTCCCTACACGACGCTCTTCCGATCTNNNNAAAGGAGCAGCTCTTCCTGG |
| site3_off5 | (SEQ ID NO: 393) |
| rev_HEK293_ | TGGAGTTCAGACGTGTGCTCTTCCGATCTGTCTGCACCATCTCCCACAA (SEQ ID |
| site3_off5 | NO: 394) |
| fwd_HEK293_ | ACACTCTTTCCCTACACGACGCTCTTCCGATCTNNNNGGCATGGCTTCTGAGACTCA |
| site4_off1 | (SEQ ID NO: 395) |
| rev_HEK293_ | TGGAGTTCAGACGTGTGCTCTTCCGATCTGTCTCCCTTGCACTCCCTGTCTTT |
| site4_off1 | (SEQ ID NO: 396) |
| fwd_HEK293_ | ACACTCTTTCCCTACACGACGCTCTTCCGATCTNNNNTTTGGCAATGGAGGCATTGG |
| site4_off2 | (SEQ ID NO: 397) |
| rev_HEK293_ | TGGAGTTCAGACGTGTGCTCTTCCGATCTGAAGAGGCTGCCCATGAGAG (SEQ ID |
| site4_off2 | NO: 398) |
| fwd_HEK293_ | ACACTCTTTCCCTACACGACGCTCTTCCGATCTNNNNGGTCTGAGGCTCGAATCCTG |
| site4_off3 | (SEQ ID NO: 399) |
| rev_HEK293_ | TGGAGTTCAGACGTGTGCTCTTCCGATCTCTGTGGCCTCCATATCCCTG (SEQ ID |
| site4_off3 | NO: 400) |
| fwd_HEK293_ | ACACTCTTTCCCTACACGACGCTCTTCCGATCTNNNNTTTCCACCAGAACTCAGCCC |
| site4_off4 | (SEQ ID NO: 401) |
| rev_HEK293_ | TGGAGTTCAGACGTGTGCTCTTCCGATCTCCTCGGTTCCTCCACAACAC (SEQ ID |
| site4_off4 | NO: 402) |
| fwd_HEK293_ | ACACTCTTTCCCTACACGACGCTCTTCCGATCTNNNNCACGGGAAGGACAGGAGAAG |
| site4_off5 | (SEQ ID NO: 403) |
| rev_HEK293_ | TGGAGTTCAGACGTGTGCTCTTCCGATCTGCAGGGGAGGGATAAAGCAG (SEQ ID |
| site4_off5 | NO: 404) |
| fwd_HEK_ | ACACTCTTTCCCTACACGACGCTCTTCCGATCTNNNNGGAAACGCCCATGCAATTAG |
| site_3 | TC (SEQ ID NO: 405) |
| rev_HEK_ | TGGAGTTCAGACGTGTGCTCTTCCGATCTCTTGTCAACCAGTATCCCGGTG (SEQ |
| site_3 | ID NO: 406) |
| fwd_HEK_ | ACACTCTTTCCCTACACGACGCTCTTCCGATCTNNNNTGAATGGATTCCTTGGAAAC |
| site_2 | AATG (SEQ ID NO: 407) |
| rev_HEK_ | TGGAGTTCAGACGTGTGCTCTTCCGATCTCCAGCCCCATCTGTCAAACT (SEQ ID |
| site_2 | NO: 408) |
| fwd_HEK_ | TGGAGTTCAGACGTGTGCTCTTCCGATCTTCCTTTCAACCCGAACGGAG (SEQ ID |
| site_4 | NO: 409) |
| rev_HEK_ | ACACTCTTTCCCTACACGACGCTCTTCCGATCTNNNNGCTGGTCTTCTTTCCCCTCC |
| site_4 | (SEQ ID NO: 410) |
| fwd_LDLR | ACACTCTTTCCCTACACGACGCTCTTCCGATCTNNNNGCCCTGCTTCTTTTTCTCTG |
| | GT (SEQ ID NO: 411) |
| rev_LDLR | TGGAGTTCAGACGTGTGCTCTTCCGATCTACCATTAACGCAGCCAACTTCA (SEQ |
| | ID NO: 412) |
| fwd_TRAC | ACACTCTTTCCCTACACGACGCTCTTCCGATCTCATGAGGTCTATGGACTTCAAGAG |
| | CAA (SEQ ID NO: 413) |
| Rev_TRAC | TGGAGTTCAGACGTGTGCTCTTCCGATCTCATCATTGACCAGAGCTCTGGGCAGAA |
| | (SEQ ID NO: 414) |
| fwd_CBLB | ACACTCTTTCCCTACACGACGCTCTTCCGATCTGCACTTACCAGCATTACTTCCTAA |
| | ACC (SEQ ID NO: 415) |
| Rev_CBLB | TGGAGTTCAGACGTGTGCTCTTCCGATCTATGGGCTCCACTTTTCAGCTCTGTAA |
| | (SEQ ID NO: 416) |
| fwd_CD7 | ACACTCTTTCCCTACACGACGCTCTTCCGATCTCAGTTCAGGCACATGTAGGAGGGA |
| | (SEQ ID NO: 417) |
| Rev_CD7 | TGGAGTTCAGACGTGTGCTCTTCCGATCTACCGCCTGCAGCTGTCGGACACTGGCA |
| | (SEQ ID NO: 418) |
| fwd_B2M | ACACTCTTTCCCTACACGACGCTCTTCCGATCTAAAAGATGAGTATGCCTGCCGTG |
| | (SEQ ID NO: 419) |
| Rev_B2M | TGGAGTTCAGACGTGTGCTCTTCCGATCTCAGATTGTTTATATCAGATGGGATGGG |
| | (SEQ ID NO: 420) |
| fwd_CIITA | ACACTCTTTCCCTACACGACGCTCTTCCGATCTATGCAAGTTTGGTCCTGAGCCCTC |
| | CC (SEQ ID NO: 421) |
| Rev_CIITA | TGGAGTTCAGACGTGTGCTCTTCCGATCTGATGTGGGTTCCCTGCGCTCTGCA |
| | (SEQ ID NO: 422) |
| fwd_PDCD1 | ACACTCTTTCCCTACACGACGCTCTTCCGATCTCCAGGGACTGAGGGTGGAAGGTCC |
| | (SEQ ID NO: 423) |
| Rev_PDCD1 | TGGAGTTCAGACGTGTGCTCTTCCGATCTACCTCCGCCTGAGCAGTGGAGAA (SEQ |
| | ID NO: 424) |

mRNA Production for ABE Editors Used in CD34+ Cells

[0984] Editors were cloned into a plasmid encoding a dT7 promoter followed by a 5′UTR, Kozak sequence, ORF, and 3′UTR. The dT7 promoter carries an inactivating point mutation within the T7 promoter that prevents transcription from circular plasmid. This plasmid templated a PCR reaction (Q5 Hot Start 2X Master Mix), in which the forward primer corrected the SNP within the T7 promoter and the reverse primer appended a 120A tail (SEQ ID NO: 425) to the 3′ UTR. The resulting PCR product was purified on a Zymo Research 25 μg DCC column and used as mRNA template in the subsequent in vitro transcription. The NEB HiScribe High-Yield Kit was used as per the instruction manual but with full substitution of N1-methyl-pseudouridine for uridine and co-transcriptional capping with CleanCap AG (Trilink). Reaction cleanup was performed by lithium chloride precipitation. Primers used for amplification can be found in Table 17.

TABLE 17
Primers used for ABE8 T7 in vitro transcription reactions

| Name | Sequence |
|---|---|
| fwd_IVT | TCGAGCTCGGTACCTAATACGACTCAC (SEQ ID NO: 426) |
| rev_IVT | TTTTTTTTTTTTTTTTTTTTTTTTTTTTTTTTTTTTTTTTTTTTTTTTTTTTTTTTTTTT |
| | TTTTTTTTTTTTTTTTTTTTTTTTTTTTTTTTTTTTTTTTTTTTTTTTTTTTTTTTTTTT |
| | CTTCCTACTCAGGCTTTATTCAAAGACCA (SEQ ID NO: 427) |

### CD34+ Cell Preparation

[0985] Mobilized peripheral blood was obtained and enriched for Human CD34+ HSPCs (HemaCare, M001F-GCSF/MOZ-2). The CD34+ cells were thawed and put into X-VIVO 10 (Lonza) containing 1% Glutamax (Gibco), 100 ng/mL of TPO (Peprotech), SCF (Peprotech) and Flt-3 (Peprotech) at 48 hours prior to electroporation

### Electroporation of CD34+ Cells

[0986] 48 hours post thaw, the cells were spun down to remove the X-VIVO 10 media and washed in MaxCyte buffer (HyClone) with 0.1% HSA (Akron Biotechnologies). The cells were then resuspended in cold MaxCyte buffer at 1,250,000 cells per mL and split into multiple 20 μL aliquots. The ABE mRNA (0.15 μM) and −198 HBG1/2 sgRNA (4.05 μM) were then aliquoted as per the experimental conditions and raised to a total of 54 in MaxCyte buffer. The 20 μL of cells was the added into the 5 μL RNA mixture in groups of 3 and loaded into each chamber of an OC25×3 MaxCyte cuvette for electroporation. After receiving the charge, 25 μL was collected from the chambers and placed in the center of the wells in a 24-well untreated culture plate. The cells recovered for 20 minutes in an incubator (37° C., 5% CO₂). After the 20 minutes recovery, X-VIVO 10 containing 1% Glutamax, 100 ng/mL of TPO, SCF and Flt-3 was added to the cells for a concentration of 1,000,000 cells per mL. The cells were then left to further recover in an incubator (37° C., 5% CO₂) for 48 hrs.

### Erythrocyte Differentiation Post ABE Electroporation

[0987] Following 48 h post electroporation rest (day 0 of culture), the cells were spun down and moved to “Phase 1” IMDM media (ATCC) containing 5% human serum, 330 μg/mL transferrin (Sigma), 10 μg/mL human insulin (Sigma), 2 U/mL heparin sodium (Sigma), 3 U/mL EPO (Peprotech), 100 ng/mL SCF (Peprotech), 5 μg/mL IL3 and 50 μM hydrocortisone (Sigma) at 20,000 cells per mL. On day 4 of culture, the cells were fed 4× volume of the same media. On day 7, the cells were spun down and moved to “Phase 2” IMDM media containing 5% human serum (Sigma), 330 μg/mL transferrin, 10 μg/mL human insulin, 2 U/mL heparin sodium, 3 U/mL EPO and 100 ng/mL SCF at 200,000 cells per mL. On day 11, cells were spun down and moved to “Phase 3” IMDM media containing 5% human serum, 330 μg/mL of transferrin, 10 μg/mL human insulin, 2 U/mL of heparin sodium and 3 U/mL of EPO at 1,000,000 cells per mL. On day 14, the cells were spun down and resuspended in the same media as day 11 but at 5,000,000 cells per mL. On day 18, the differentiated red blood cells were collected in 500,000 cell aliquots, washed once in 500 μL DPBS (Gibco) and frozen at −80° C. for 24 hours before UHPLC processing.

### Preparation of Red Blood Cell Sample for UHPLC Analysis

[0988] Frozen red blood cell pellets were thawed at room temperature. Pellets were diluted to a final concentration of 5×10⁴ cells/μL with ACK lysis buffer. Samples were mixed by pipette and incubated at room temperate for 5 min. Samples were then frozen in at −80° C. for 5 min, allowed to thaw, and mixed by pipette prior to centrifugation at 6,700g for 10 min. The supernatant was carefully removed (without disturbing cell debris pellet), transferred to a new plate and diluted to 5×10³ cells/μL in ultrapure water for UHPLC analysis.

### Ultra-High Performance Liquid Chromatography (UHPLC) Analysis

[0989] Reverse-phase separation of globin chains was performed on a UHPLC system configured with a binary pump and UV detector (Thermo Fisher Scientific, Vanquish Horizon). The stationary phase consisted of an ACQUITY Peptide BEH C18 Column (2.1×150 mm, 1.7 μm beads, 300A pores) after an AQUITY Peptide BEH C18 VanGuard pre-column (2.1×5 mm, 1.7 μm beads, 300A pores) (both Waters Corp) with a column temperature of 60° C. Elution was preformed using 0.1% trifluoroacetic acid (TFA) in water (A) and 0.08% TFA in acetonitrile (B) with a flow rate of 0.25 mL/min. Separation of the globin chains was achieved using a linear gradient of 40-52% B from 0-10 min; 52-40% B from 10-10.5 min; 40% B to 12 min. Sample injection volume was 10 μL, UV spectra at a wavelength of 220 nm with a data rate of 5 Hz was collected throughout the analysis. Globin chain identities were confirmed through LC/MS analysis of hemoglobin standards.

### Genomic DNA Extraction for CD34+ Cells

[0990] Following ABE electroporation (48 h later), an aliquot of cells was cultured in X-VIVO 10 media (Lonza) containing 1% Glutamax (Gibco), 100 ng/mL of TPO (Peprotech), SCF (Peprotech) and Flt-3 (Peprotech). Following 48 h and 144 h post culturing, 100,000 cells were collected and spun down. 50 μL of Quick Extract (Lucigen) was added to the cell pellet and the cell mixture was transferred to a 96-well PCR plate (Bio-Rad). The lysate was heated for 15 minutes at 65° C. followed by 10 minutes at 98° C. The cell lysates were stored at −20° C.

### Sequences

[0991] In the following sequence, lower case denotes the kanamycin resistance promoter region, bold sequence indicates targeted inactivation portion (Q4* and W15*), the italicized sequence denotes the targeted inactive site of kanamycin resistance gene (D208N), and the underlined sequences denote the PAM sequences.

### Inactivated Kanamycin Resistance Gene:

(SEQ ID NO: 309)
ccggaattgccagctggggcgccctctggtaaggttgggaagccctgcaaagtaaactggatgg
ctttcttgccgccaaggatctgatggcgcaggggatcaagatctgatcaagagacaggatgagg
atcctttcgcATGATCGAATAAGATGGATTGCACGCAGGTTCTCCGGCCGCTTAGGTGGAGCGC
CTATTCGGCTATGACTGGGCACAACAGACAATCGGCTGCTCTGATGCCGCCGTGTTCCGGCTGT
CAGCGCAGGGGCGCCCGGTTCTTTTTGTCAAGACCGACCTGTCCGGTGCCCTGAATGAACTGCA
GGACGAGGCAGCGCGGCTATCGTGGCTGGCCACGACGGGCGTTCCTTGCGCAGCTGTGCTCGAC
GTTGTCACTGAAGCGGGAAGGGACTGGCTGCTATTGGGCGAAGTGCCGGGGCAGGATCTCCTGT
CATCTCACCTTGCTCCTGCCGAGAAAGTATCCATCATGGCTGATGCAATGCGGCGGCTGCATAC
GCTTGATCCGGCTACCTGCCCATTCGACCACCAAGCGAAACATCGCATCGAGCGAGCACGTACT
CGGATGGAAGCCGGTCTTGTCGATCAGGATGATCTGGACGAAGAGCATCAGGGGCTCGCGCCAG
CCGAACTGTTCGCCAGGCTCAAGGCGCGCATGCCCGACGGCGAGGATCTCGTCGTGACCCATGG
CGATGCCTGCTTGCCGAATATCATGGTGGAAAATGGCCGCTTTTCTGGATTCATTAACTGTGGC
CGGCTGGGTGTGGCGGACCGCTATCAGGACATAGCGTTGGCTACCCGTGATATTGCTGAAGAGC
TTGGCGGCGAATGGGCTGACCGCTTCCTCGTGCTTTACGGTATCGCCGCTCCCGATTCGCAGCG
CATCGCCTTCTATCGCCTTCTTGACGAGTTCTTCTAA

[0993] In the following sequences, the plain text denotes an adenosine deaminase sequence, bold sequence indicates sequence derived from Cas9, the italicized sequence denotes a linker sequence, underlined sequence denotes a bipartite nuclear localization sequence, and double underlined sequence indicates mutations.

CP5 (with MSP “NGC” PID and “D10A” nickase):
(SEQ ID NO: 38)
EIGKATAKYFFYSNIMNFFKTEITLANGEIRKRPLIETNGETGEIVWDKGRDFATVRKVLSMPQ
VNIVKKTEVQTGGFSKESILPKRNSDKLIARKKDWDPKKYGGFMQPTVAYSVLVVAKVEKGKSK
KLKSVKELLGITIMERSSFEKNPIDFLEAKGYKEVKKDLIIKLPKYSLFELENGRKRMLASAKF
LQKGNELALPSKYVNFLYLASHYEKLKGSPEDNEQKQLFVEQHKHYLDEIIEQISEFSKRVILA
DANLDKVLSAYNKHRDKPIREQAENIIHLFTLTNLGAPRAFKYFDTTIARKEYRSTKEVLDATL
IHQSITGLYETRIDLSQLGGDGGSGGSGGSGGSGGSGGSGGMDKKYSIGLAIGTNSVGWAVITD
EYKVPSKKFKVLGNTDRHSIKKNLIGALLFDSGETAEATRLKRTARRRYTRRKNRICYLQEIFS
NEMAKVDDSFFHRLEESFLVEEDKKHERHPIFGNIVDEVAYHEKYPTIYHLRKKLVDSTDKADL
RLIYLALAHMIKFRGHFLIEGDLNPDNSDVDKLFIQLVQTYNQLFEENPINASGVDAKAILSAR
LSKSRRLENLIAQLPGEKKNGLFGNLIALSLGLTPNFKSNFDLAEDAKLQLSKDTYDDDLDNLL
AQIGDQYADLFLAAKNLSDAILLSDILRVNTEITKAPLSASMIKRYDEHHQDLTLLKALVRQQL
PEKYKEIFFDQSKNGYAGYIDGGASQEEFYKFIKPILEKMDGTEELLVKLNREDLLRKQRTFDN
GSIPHQIHLGELHAILRRQEDFYPFLKDNREKIEKILTFRIPYYVGPLARGNSRFAWMTRKSEE
TITPWNFEEVVDKGASAQSFIERMTNFDKNLPNEKVLPKHSLLYEYFTVYNELTKVKYVTEGMR
KPAFLSGEQKKAIVDLLFKTNRKVTVKQLKEDYFKKIECFDSVEISGVEDRFNASLGTYHDLLK
IIKDKDFLDNEENEDILEDIVLTLTLFEDREMIEERLKTYAHLFDDKVMKQLKRRRYTGWGRLS
RKLINGIRDKQSGKTILDFLKSDGFANRNFMQLIHDDSLTFKEDIQKAQVSGQGDSLHEHIANL
AGSPAIKKGILQTVKVVDELVKVMGRHKPENIVIEMARENQTTQKGQKNSRERMKRIEEGIKEL
GSQILKEHPVENTQLQNEKLYLYYLQNGRDMYVDQELDINRLSDYDVDHIVPQSFLKDDSIDNK
VLTRSDKNRGKSDNVPSEEVVKKMKNYWRQLLNAKLITQRKFDNLTKAERGGLSELDKAGFIKR
QLVETRQITKHVAQILDSRMNTKYDENDKLIREVKVITLKSKLVSDFRKDFQFYKVREINNYHH
AHDAYLNAVVGTALIKKYPKLESEFVYGDYKVYDVRKMIAKSEQEGADKRTADGSEFESPKKKR
KV*
ABE8.1_Y147T_CP5_NGC PAM_monomer
(SEQ ID NO: 254)
MSEVEFSHEYWMRHALTLAKRARDEREVPVGAVLVLNNRVIGEGWNRAIGLHDPTAHAEIMALR
QGGLVMQNYRLIDATLYVTFEPCVMCAGAMIHSRIGRVVFGVRNAKTGAAGSLMDVLHYPGMNH
RVEITEGILADECAALLCTFFRMPRQVFNAQKKAQSSTD [symbol] [symbol] [symbol]
EIGKATAKYFFYSNIMNFFKTEITLANGEIRKRPLIETNGETGEIVWDKGRDFATVR
KVLSMPQVNIVKKTEVQTGGFSKESILPKRNSDKLIARKKDWDPKKYGGFMQPTVAYSVLVVAK
VEKGKSKKLKSVKELLGITIMERSSFEKNPIDFLEAKGYKEVKKDLIIKLPKYSLFELENGRKR
MLASAKFLQKGNELALPSKYVNFLYLASHYEKLKGSPEDNEQKQLFVEQHKHYLDEIIEQISEF
SKRVILADANLDKVLSAYNKHRDKPIREQAENIIHLFTLTNLGAPRAFKYFDTTIARKEYRSTK
EVLDATLIHQSITGLYETRIDLSQLGGD [symbol] [symbol] DKKYSIGLAIGTNSV
GWAVITDEYKVPSKKFKVLGNTDRHSIKKNLIGALLFDSGETAEATRLKRTARRRYTRRKNRIC
YLQEIFSNEMAKVDDSFFHRLEESFLVEEDKKHERHPIFGNIVDEVAYHEKYPTIYHLRKKLVD
STDKADLRLIYLALAHMIKFRGHFLIEGDLNPDNSDVDKLFIQLVQTYNQLFEENPINASGVDA
KAILSARLSKSRRLENLIAQLPGEKKNGLFGNLIALSLGLTPNFKSNFDLAEDAKLQLSKDTYD
DDLDNLLAQIGDQYADLFLAAKNLSDAILLSDILRVNTEITKAPLSASMIKRYDEHHQDLTLLK
ALVRQQLPEKYKEIFFDQSKNGYAGYIDGGASQEEFYKFIKPILEKMDGTEELLVKLNREDLLR
KQRTFDNGSIPHQIHLGELHAILRRQEDFYPFLKDNREKIEKILTFRIPYYVGPLARGNSRFAW
MTRKSEETITPWNFEEVVDKGASAQSFIERMTNFDKNLPNEKVLPKHSLLYEYFTVYNELTKVK
YVTEGMRKPAFLSGEQKKAIVDLLFKTNRKVTVKQLKEDYFKKIECFDSVEISGVEDRFNASLG
TYHDLLKIIKDKDFLDNEENEDILEDIVLTLTLFEDREMIEERLKTYAHLFDDKVMKQLKRRRY
TGWGRLSRKLINGIRDKQSGKTILDFLKSDGFANRNFMQLIHDDSLTFKEDIQKAQVSGQGDSL
HEHIANLAGSPAIKKGILQTVKVVDELVKVMGRHKPENIVIEMARENQTTQKGQKNSRERMKRI
EEGIKELGSQILKEHPVENTQLQNEKLYLYYLQNGRDMYVDQELDINRLSDYDVDHIVPQSFLK
DDSIDNKVLTRSDKNRGKSDNVPSEEVVKKMKNYWRQLLNAKLITQRKFDNLTKAERGGLSELD
KAGFIKRQLVETRQITKHVAQILDSRMNTKYDENDKLIREVKVITLKSKLVSDFRKDFQFYKVR
EINNYHHAHDAYLNAVVGTALIKKYPKLESEFVYGDYKVYDVRKMIAKSEQEGADKRTADGSEE
ESPKKKRKV*
pNMG-B335 ABE8.1_Y147T_CP5_NGC PAM_monomer
(SEQ ID NO: 254)
MSEVEFSHEYWMRHALTLAKRARDEREVPVGAVLVLNNRVIGEGWNRAIGLHDPTAHAEIMALR
QGGLVMQNYRLIDATLYVTFEPCVMCAGAMIHSRIGRVVFGVRNAKTGAAGSLMDVLHYPGMNH
RVEITEGILADECAALLCTFFRMPRQVFNAQKKAQSSTDSGGSSGGSSGSEPPGPSESATPESS
GGSSGGSEIGKATAKYFFYSNIMNFFKTEITLANGEIRKRPLIETNGETGEIVWDKGRDFATVR
KVLSMPQVNIVKKTEVQTGGFSKESILPKRNSDKLIARKKDWDPKKYGGFMQPTVAYSVLVVAK
VEKGKSKKLKSVKELLGITIMERSSFEKNPIDFLEAKGYKEVKKDLIIKLPKYSLFELENGRKR
MLASAKFLQKGNELALPSKYVNFLYLASHYEKLKGSPEDNEQKQLFVEQHKHYLDEIIEQISEF
SKRVILADANLDKVLSAYNKHRDKPIREQAENIIHLFTLTNLGAPRAFKYFDTTIARKEYRSTK
EVLDATLIHQSITGLYETRIDLSQLGGDGGSGGSGGSGGSGGSGGSGGMDKKYSIGLAIGTNSV
GWAVITDEYKVPSKKFKVLGNTDRHSIKKNLIGALLFDSGETAEATRLKRTARRRYTRRKNRIC
YLQEIFSNEMAKVDDSFFHRLEESFLVEEDKKHERHPIFGNIVDEVAYHEKYPTIYHLRKKLVD
STDKADLRLIYLALAHMIKFRGHFLIEGDLNPDNSDVDKLFIQLVQTYNQLFEENPINASGVDA
KAILSARLSKSRRLENLIAQLPGEKKNGLFGNLIALSLGLTPNFKSNFDLAEDAKLQLSKDTYD
DDLDNLLAQIGDQYADLFLAAKNLSDAILLSDILRVNTEITKAPLSASMIKRYDEHHQDLTLLK
ALVRQQLPEKYKEIFFDQSKNGYAGYIDGGASQEEFYKFIKPILEKMDGTEELLVKLNREDLLR
KQRTFDNGSIPHQIHLGELHAILRRQEDFYPFLKDNREKIEKILTFRIPYYVGPLARGNSRFAW
MTRKSEETITPWNFEEVVDKGASAQSFIERMTNFDKNLPNEKVLPKHSLLYEYFTVYNELTKVK
YVTEGMRKPAFLSGEQKKAIVDLLFKTNRKVTVKQLKEDYFKKIECFDSVEISGVEDRFNASLG
TYHDLLKIIKDKDFLDNEENEDILEDIVLTLTLFEDREMIEERLKTYAHLFDDKVMKQLKRRRY
TGWGRLSRKLINGIRDKQSGKTILDFLKSDGFANRNFMQLIHDDSLTFKEDIQKAQVSGQGDSL
HEHIANLAGSPAIKKGILQTVKVVDELVKVMGRHKPENIVIEMARENQTTQKGQKNSRERMKRI
EEGIKELGSQILKEHPVENTQLQNEKLYLYYLQNGRDMYVDQELDINRLSDYDVDHIVPQSFLK
DDSIDNKVLTRSDKNRGKSDNVPSEEVVKKMKNYWRQLLNAKLITQRKFDNLTKAERGGLSELD
KAGFIKRQLVETRQITKHVAQILDSRMNTKYDENDKLIREVKVITLKSKLVSDFRKDFQFYKVR
EINNYHHAHDAYLNAVVGTALIKKYPKLESEFVYGDYKVYDVRKMIAKSEQEGADKRTADGSEE
ESPKKKRKV*
pNMG-357_ABE8.14 withNGC PAM CP5
(SEQ ID NO: 255)
MSEVEFSHEYWMRHALTLAKRAWDEREVPVGAVLVHNNRVIGEGWNRPIGRHDPTAHAEIMALR
QGGLVMQNYRLIDATLYVTLEPCVMCAGAMIHSRIGRVVFGARDAKTGAAGSLMDVLHHPGMNH
RVEITEGILADECAALLSDFFRMRRQEIKAQKKAQSSTDGGSSGGSSGSEPPGPSESATPESSG
GSSGGSMSEVEFSHEYWMRHALTLAKRARDEREVPVGAVLVLNNRVIGEGWNRAIGLHDPTAHA
EIMALRQGGLVMQNYRLIDATLYVTFEPCVMCAGAMIHSRIGRVVFGVRNAKTGAAGSLMDVLH
YPGMNHRVEITEGILADECAALLCTFFRMPRQVFNAQKKAQSSTDSGGSSGGSSGSEPPGPSES
ATPESSGGSSGGS
EIGKATAKYFFYSNIMNFFKTEITLANGEIRKRPLIETNGETGEIVWDKGRDFATVRKVLSMPQ
VNIVKKTEVQTGGFSKESILPKRNSDKLIARKKDWDPKKYGGFMQPTVAYSVLVVAKVEKGKSK
KLKSVKELLGITIMERSSFEKNPIDFLEAKGYKEVKKDLIIKLPKYSLFELENGRKRMLASAKF
LQKGNELALPSKYVNFLYLASHYEKLKGSPEDNEQKQLFVEQHKHYLDEIIEQISEFSKRVILA
DANLDKVLSAYNKHRDKPIREQAENIIHLFTLTNLGAPRAFKYFDTTIARKEYRSTKEVLDATL
IHQSITGLYETRIDLSQLGGDGGSGGSGGSGGSGGSGGSGGMDKKYSIGLAIGTNSVGWAVITD
EYKVPSKKFKVLGNTDRHSIKKNLIGALLFDSGETAEATRLKRTARRRYTRRKNRICYLQEIFS
NEMAKVDDSFFHRLEESFLVEEDKKHERHPIFGNIVDEVAYHEKYPTIYHLRKKLVDSTDKADL
RLIYLALAHMIKFRGHFLIEGDLNPDNSDVDKLFIQLVQTYNQLFEENPINASGVDAKAILSAR
LSKSRRLENLIAQLPGEKKNGLFGNLIALSLGLTPNFKSNFDLAEDAKLQLSKDTYDDDLDNLL
AQIGDQYADLFLAAKNLSDAILLSDILRVNTEITKAPLSASMIKRYDEHHQDLTLLKALVRQQL
PEKYKEIFFDQSKNGYAGYIDGGASQEEFYKFIKPILEKMDGTEELLVKLNREDLLRKQRTFDN
GSIPHQIHLGELHAILRRQEDFYPFLKDNREKIEKILTFRIPYYVGPLARGNSRFAWMTRKSEE
TITPWNFEEVVDKGASAQSFIERMTNFDKNLPNEKVLPKHSLLYEYFTVYNELTKVKYVTEGMR
KPAFLSGEQKKAIVDLLFKTNRKVTVKQLKEDYFKKIECFDSVEISGVEDRFNASLGTYHDLLK
IIKDKDFLDNEENEDILEDIVLTLTLFEDREMIEERLKTYAHLFDDKVMKQLKRRRYTGWGRLS
RKLINGIRDKQSGKTILDFLKSDGFANRNFMQLIHDDSLTFKEDIQKAQVSGQGDSLHEHIANL
AGSPAIKKGILQTVKVVDELVKVMGRHKPENIVIEMARENQTTQKGQKNSRERMKRIEEGIKEL
GSQILKEHPVENTQLQNEKLYLYYLQNGRDMYVDQELDINRLSDYDVDHIVPQSFLKDDSIDNK
VLTRSDKNRGKSDNVPSEEVVKKMKNYWRQLLNAKLITQRKFDNLTKAERGGLSELDKAGFIKR
QLVETRQITKHVAQILDSRMNTKYDENDKLIREVKVITLKSKLVSDFRKDFQFYKVREINNYHH
AHDAYLNAVVGTALIKKYPKLESEFVYGDYKVYDVRKMIAKSEQEGADKRTADGSEEESPKKKR
KV*
ABE8.8-m
(SEQ ID NO: 256)
MSEVEFSHEYWMRHALTLAKRARDEREVPVGAVLVLNNRVIGEGWNRAIGLHDPTAHAEIMALR
QGGLVMQNYRLIDATLYVTFEPCVMCAGAMIHSRIGRVVFGVRNAKTGAAGSLMDVLHHPGMNH
RVEITEGILADECAALLCRFFRMPRRVFNAQKKAQSSTDSGGSSGGSSGSETPGTSESATPESS
GGSSGGSDKKYSIGLAIGTNSVGWAVITDEYKVPSKKFKVLGNTDRHSIKKNLIGALLFDSGET
AEATRLKRTARRRYTRRKNRICYLQEIFSNEMAKVDDSFFHRLEESFLVEEDKKHERHPIFGNI
VDEVAYHEKYPTIYHLRKKLVDSTDKADLRLIYLALAHMIKFRGHFLIEGDLNPDNSDVDKLFI
QLVQTYNQLFEENPINASGVDAKAILSARLSKSRRLENLIAQLPGEKKNGLFGNLIALSLGLTP
NFKSNFDLAEDAKLQLSKDTYDDDLDNLLAQIGDQYADLFLAAKNLSDAILLSDILRVNTEITK
APLSASMIKRYDEHHQDLTLLKALVRQQLPEKYKEIFFDQSKNGYAGYIDGGASQEEFYKFIKP
ILEKMDGTEELLVKLNREDLLRKQRTFDNGSIPHQIHLGELHAILRRQEDFYPFLKDNREKIEK
ILTFRIPYYVGPLARGNSRFAWMTRKSEETITPWNFEEVVDKGASAQSFIERMTNFDKNLPNEK
VLPKHSLLYEYFTVYNELTKVKYVTEGMRKPAFLSGEQKKAIVDLLFKTNRKVTVKQLKEDYFK
KIECFDSVEISGVEDRFNASLGTYHDLLKIIKDKDFLDNEENEDILEDIVLTLTLFEDREMIEE
RLKTYAHLFDDKVMKQLKRRRYTGWGRLSRKLINGIRDKQSGKTILDFLKSDGFANRNFMQLIH
DDSLTFKEDIQKAQVSGQGDSLHEHIANLAGSPAIKKGILQTVKVVDELVKVMGRHKPENIVIE
MARENQTTQKGQKNSRERMKRIEEGIKELGSQILKEHPVENTQLQNEKLYLYYLQNGRDMYVDQ
ELDINRLSDYDVDHIVPQSFLKDDSIDNKVLTRSDKNRGKSDNVPSEEVVKKMKNYWRQLLNAK
LITQRKFDNLTKAERGGLSELDKAGFIKRQLVETRQITKHVAQILDSRMNTKYDENDKLIREVK
VITLKSKLVSDFRKDFQFYKVREINNYHHAHDAYLNAVVGTALIKKYPKLESEFVYGDYKVYDV
RKMIAKSEQEIGKATAKYFFYSNIMNFFKTEITLANGEIRKRPLIETNGETGEIVWDKGRDFAT
VRKVLSMPQVNIVKKTEVQTGGFSKESILPKRNSDKLIARKKDWDPKKYGGFDSPTVAYSVLVV
AKVEKGKSKKLKSVKELLGITIMERSSFEKNPIDFLEAKGYKEVKKDLIIKLPKYSLFELENGR
KRMLASAGELQKGNELALPSKYVNFLYLASHYEKLKGSPEDNEQKQLFVEQHKHYLDEIIEQIS
EFSKRVILADANLDKVLSAYNKHRDKPIREQAENIIHLFTLTNLGAPAAFKYFDTTIDRKRYTS
TKEVLDATLIHQSITGLYETRIDLSQLGGDEGADKRTADGSEFESPKKKRKV*
ABE8.8-d
(SEQ ID NO: 257)
MSEVEFSHEYWMRHALTLAKRAWDEREVPVGAVLVHNNRVIGEGWNRPIGRHDPTAHAEIMALR
QGGLVMQNYRLIDATLYVTLEPCVMCAGAMIHSRIGRVVFGARDAKTGAAGSLMDVLHHPGMNH
RVEITEGILADECAALLSDFFRMRRQEIKAQKKAQSSTDSGGSSGGSSGSETPGTSESATPESS
GGSSGGSSEVEFSHEYWMRHALTLAKRARDEREVPVGAVLVLNNRVIGEGWNRAIGLHDPTAHA
EIMALRQGGLVMQNYRLIDATLYVTFEPCVMCAGAMIHSRIGRVVFGVRNAKTGAAGSLMDVLH
HPGMNHRVEITEGILADECAALLCRFFRMPRRVFNAQKKAQSSTDSGGSSGGSSGSETPGTSES
ATPESSGGSSGGSDKKYSIGLAIGTNSVGWAVITDEYKVPSKKFKVLGNTDRHSIKKNLIGALL
FDSGETAEATRLKRTARRRYTRRKNRICYLQEIFSNEMAKVDDSFFHRLEESFLVEEDKKHERH
PIFGNIVDEVAYHEKYPTIYHLRKKLVDSTDKADLRLIYLALAHMIKFRGHFLIEGDLNPDNSD
VDKLFIQLVQTYNQLFEENPINASGVDAKAILSARLSKSRRLENLIAQLPGEKKNGLFGNLIAL
SLGLTPNFKSNFDLAEDAKLQLSKDTYDDDLDNLLAQIGDQYADLFLAAKNLSDAILLSDILRV
NTEITKAPLSASMIKRYDEHHQDLTLLKALVRQQLPEKYKEIFFDQSKNGYAGYIDGGASQEEF
YKFIKPILEKMDGTEELLVKLNREDLLRKQRTFDNGSIPHQIHLGELHAILRRQEDFYPFLKDN
REKIEKILTFRIPYYVGPLARGNSRFAWMTRKSEETITPWNFEEVVDKGASAQSFIERMTNFDK
NLPNEKVLPKHSLLYEYFTVYNELTKVKYVTEGMRKPAFLSGEQKKAIVDLLFKTNRKVTVKQL
KEDYFKKIECFDSVEISGVEDRFNASLGTYHDLLKIIKDKDFLDNEENEDILEDIVLTLTLFED
REMIEERLKTYAHLFDDKVMKQLKRRRYTGWGRLSRKLINGIRDKQSGKTILDFLKSDGFANRN
FMQLIHDDSLTFKEDIQKAQVSGQGDSLHEHIANLAGSPAIKKGILQTVKVVDELVKVMGRHKP
ENIVIEMARENQTTQKGQKNSRERMKRIEEGIKELGSQILKEHPVENTQLQNEKLYLYYLQNGR
DMYVDQELDINRLSDYDVDHIVPQSFLKDDSIDNKVLTRSDKNRGKSDNVPSEEVVKKMKNYWR
QLLNAKLITQRKFDNLTKAERGGLSELDKAGFIKRQLVETRQITKHVAQILDSRMNTKYDENDK
LIREVKVITLKSKLVSDFRKDFQFYKVREINNYHHAHDAYLNAVVGTALIKKYPKLESEFVYGD
YKVYDVRKMIAKSEQEIGKATAKYFFYSNIMNFFKTEITLANGEIRKRPLIETNGETGEIVWDK
GRDFATVRKVLSMPQVNIVKKTEVQTGGFSKESILPKRNSDKLIARKKDWDPKKYGGFDSPTVA
YSVLVVAKVEKGKSKKLKSVKELLGITIMERSSFEKNPIDFLEAKGYKEVKKDLIIKLPKYSLF
ELENGRKRMLASAGELQKGNELALPSKYVNFLYLASHYEKLKGSPEDNEQKQLFVEQHKHYLDE
IIEQISEFSKRVILADANLDKVLSAYNKHRDKPIREQAENIIHLFTLTNLGAPAAFKYFDTTID
RKRYTSTKEVLDATLIHQSITGLYETRIDLSQLGGDEGADKRTADGSEFESPKKKRKV*
ABE8.13-m
(SEQ ID NO: 258)
MSEVEFSHEYWMRHALTLAKRARDEREVPVGAVLVLNNRVIGEGWNRAIGLHDPTAHAEIMALR
QGGLVMQNYRLYDATLYVTFEPCVMCAGAMIHSRIGRVVFGVRNAKTGAAGSLMDVLHHPGMNH
RVEITEGILADECAALLCRFFRMPRRVFNAQKKAQSSTDSGGSSGGSSGSETPGTSESATPESS
GGSSGGSDKKYSIGLAIGTNSVGWAVITDEYKVPSKKFKVLGNTDRHSIKKNLIGALLFDSGET
AEATRLKRTARRRYTRRKNRICYLQEIFSNEMAKVDDSFFHRLEESFLVEEDKKHERHPIFGNI
VDEVAYHEKYPTIYHLRKKLVDSTDKADLRLIYLALAHMIKFRGHFLIEGDLNPDNSDVDKLFI
QLVQTYNQLFEENPINASGVDAKAILSARLSKSRRLENLIAQLPGEKKNGLFGNLIALSLGLTP
NFKSNFDLAEDAKLQLSKDTYDDDLDNLLAQIGDQYADLFLAAKNLSDAILLSDILRVNTEITK
APLSASMIKRYDEHHQDLTLLKALVRQQLPEKYKEIFFDQSKNGYAGYIDGGASQEEFYKFIKP
ILEKMDGTEELLVKLNREDLLRKQRTFDNGSIPHQIHLGELHAILRRQEDFYPFLKDNREKIEK
ILTFRIPYYVGPLARGNSRFAWMTRKSEETITPWNFEEVVDKGASAQSFIERMTNFDKNLPNEK
VLPKHSLLYEYFTVYNELTKVKYVTEGMRKPAFLSGEQKKAIVDLLFKTNRKVTVKQLKEDYFK
KIECFDSVEISGVEDRFNASLGTYHDLLKIIKDKDFLDNEENEDILEDIVLTLTLFEDREMIEE
RLKTYAHLFDDKVMKQLKRRRYTGWGRLSRKLINGIRDKQSGKTILDFLKSDGFANRNFMQLIH
DDSLTFKEDIQKAQVSGQGDSLHEHIANLAGSPAIKKGILQTVKVVDELVKVMGRHKPENIVIE
MARENQTTQKGQKNSRERMKRIEEGIKELGSQILKEHPVENTQLQNEKLYLYYLQNGRDMYVDQ
ELDINRLSDYDVDHIVPQSFLKDDSIDNKVLTRSDKNRGKSDNVPSEEVVKKMKNYWRQLLNAK
LITQRKFDNLTKAERGGLSELDKAGFIKRQLVETRQITKHVAQILDSRMNTKYDENDKLIREVK
VITLKSKLVSDFRKDFQFYKVREINNYHHAHDAYLNAVVGTALIKKYPKLESEFVYGDYKVYDV
RKMIAKSEQEIGKATAKYFFYSNIMNFFKTEITLANGEIRKRPLIETNGETGEIVWDKGRDFAT
VRKVLSMPQVNIVKKTEVQTGGFSKESILPKRNSDKLIARKKDWDPKKYGGFDSPTVAYSVLVV
AKVEKGKSKKLKSVKELLGITIMERSSFEKNPIDFLEAKGYKEVKKDLIIKLPKYSLFELENGR
KRMLASAGELQKGNELALPSKYVNFLYLASHYEKLKGSPEDNEQKQLFVEQHKHYLDEIIEQIS
EFSKRVILADANLDKVLSAYNKHRDKPIREQAENIIHLFTLTNLGAPAAFKYFDTTIDRKRYTS
TKEVLDATLIHQSITGLYETRIDLSQLGGDEGADKRTADGSEFESPKKKRKV*
ABE8.13-d
(SEQ ID NO: 259)
MSEVEFSHEYWMRHALTLAKRAWDEREVPVGAVLVHNNRVIGEGWNRPIGRHDPTAHAEIMALR
QGGLVMQNYRLIDATLYVTLEPCVMCAGAMIHSRIGRVVFGARDAKTGAAGSLMDVLHHPGMNH
RVEITEGILADECAALLSDFFRMRRQEIKAQKKAQSSTDSGGSSGGSSGSETPGTSESATPESS
GGSSGGSSEVEFSHEYWMRHALTLAKRARDEREVPVGAVLVLNNRVIGEGWNRAIGLHDPTAHA
EIMALRQGGLVMQNYRLYDATLYVTFEPCVMCAGAMIHSRIGRVVFGVRNAKTGAAGSLMDVLH
HPGMNHRVEITEGILADECAALLCRFFRMPRRVFNAQKKAQSSTDSGGSSGGSSGSETPGTSES
ATPESSGGSSGGSDKKYSIGLAIGTNSVGWAVITDEYKVPSKKFKVLGNTDRHSIKKNLIGALL
FDSGETAEATRLKRTARRRYTRRKNRICYLQEIFSNEMAKVDDSFFHRLEESFLVEEDKKHERH
PIFGNIVDEVAYHEKYPTIYHLRKKLVDSTDKADLRLIYLALAHMIKFRGHFLIEGDLNPDNSD
VDKLFIQLVQTYNQLFEENPINASGVDAKAILSARLSKSRRLENLIAQLPGEKKNGLFGNLIAL
SLGLTPNFKSNFDLAEDAKLQLSKDTYDDDLDNLLAQIGDQYADLFLAAKNLSDAILLSDILRV
NTEITKAPLSASMIKRYDEHHQDLTLLKALVRQQLPEKYKEIFFDQSKNGYAGYIDGGASQEEF
YKFIKPILEKMDGTEELLVKLNREDLLRKQRTFDNGSIPHQIHLGELHAILRRQEDFYPFLKDN
REKIEKILTFRIPYYVGPLARGNSRFAWMTRKSEETITPWNFEEVVDKGASAQSFIERMTNFDK
NLPNEKVLPKHSLLYEYFTVYNELTKVKYVTEGMRKPAFLSGEQKKAIVDLLFKTNRKVTVKQL
KEDYFKKIECFDSVEISGVEDRFNASLGTYHDLLKIIKDKDFLDNEENEDILEDIVLTLTLFED
REMIEERLKTYAHLFDDKVMKQLKRRRYTGWGRLSRKLINGIRDKQSGKTILDFLKSDGFANRN
FMQLIHDDSLTFKEDIQKAQVSGQGDSLHEHIANLAGSPAIKKGILQTVKVVDELVKVMGRHKP
ENIVIEMARENQTTQKGQKNSRERMKRIEEGIKELGSQILKEHPVENTQLQNEKLYLYYLQNGR
DMYVDQELDINRLSDYDVDHIVPQSFLKDDSIDNKVLTRSDKNRGKSDNVPSEEVVKKMKNYWR
QLLNAKLITQRKFDNLTKAERGGLSELDKAGFIKRQLVETRQITKHVAQILDSRMNTKYDENDK
LIREVKVITLKSKLVSDFRKDFQFYKVREINNYHHAHDAYLNAVVGTALIKKYPKLESEFVYGD
YKVYDVRKMIAKSEQEIGKATAKYFFYSNIMNFFKTEITLANGEIRKRPLIETNGETGEIVWDK
GRDFATVRKVLSMPQVNIVKKTEVQTGGFSKESILPKRNSDKLIARKKDWDPKKYGGFDSPTVA
YSVLVVAKVEKGKSKKLKSVKELLGITIMERSSFEKNPIDFLEAKGYKEVKKDLIIKLPKYSLF
ELENGRKRMLASAGELQKGNELALPSKYVNFLYLASHYEKLKGSPEDNEQKQLFVEQHKHYLDE
IIEQISEFSKRVILADANLDKVLSAYNKHRDKPIREQAENIIHLFTLTNLGAPAAFKYFDTTID
RKRYTSTKEVLDATLIHQSITGLYETRIDLSQLGGDEGADKRTADGSEFESPKKKRKV*
ABE8.17-m
(SEQ ID NO: 260)
MSEVEFSHEYWMRHALTLAKRARDEREVPVGAVLVLNNRVIGEGWNRAIGLHDPTAHAEIMALR
QGGLVMQNYRLIDATLYSTFEPCVMCAGAMIHSRIGRVVFGVRNAKTGAAGSLMDVLHYPGMNH
RVEITEGILADECAALLCYFFRMPRRVFNAQKKAQSSTDSGGSSGGSSGSETPGTSESATPESS
GGSSGGSDKKYSIGLAIGTNSVGWAVITDEYKVPSKKFKVLGNTDRHSIKKNLIGALLFDSGET
AEATRLKRTARRRYTRRKNRICYLQEIFSNEMAKVDDSFFHRLEESFLVEEDKKHERHPIFGNI
VDEVAYHEKYPTIYHLRKKLVDSTDKADLRLIYLALAHMIKFRGHFLIEGDLNPDNSDVDKLFI
QLVQTYNQLFEENPINASGVDAKAILSARLSKSRRLENLIAQLPGEKKNGLFGNLIALSLGLTP
NFKSNFDLAEDAKLQLSKDTYDDDLDNLLAQIGDQYADLFLAAKNLSDAILLSDILRVNTEITK
APLSASMIKRYDEHHQDLTLLKALVRQQLPEKYKEIFFDQSKNGYAGYIDGGASQEEFYKFIKP
ILEKMDGTEELLVKLNREDLLRKQRTFDNGSIPHQIHLGELHAILRRQEDFYPFLKDNREKIEK
ILTFRIPYYVGPLARGNSRFAWMTRKSEETITPWNFEEVVDKGASAQSFIERMTNFDKNLPNEK
VLPKHSLLYEYFTVYNELTKVKYVTEGMRKPAFLSGEQKKAIVDLLFKTNRKVTVKQLKEDYFK
KIECFDSVEISGVEDRFNASLGTYHDLLKIIKDKDFLDNEENEDILEDIVLTLTLFEDREMIEE
RLKTYAHLFDDKVMKQLKRRRYTGWGRLSRKLINGIRDKQSGKTILDFLKSDGFANRNFMQLIH
DDSLTFKEDIQKAQVSGQGDSLHEHIANLAGSPAIKKGILQTVKVVDELVKVMGRHKPENIVIE
MARENQTTQKGQKNSRERMKRIEEGIKELGSQILKEHPVENTQLQNEKLYLYYLQNGRDMYVDQ
ELDINRLSDYDVDHIVPQSFLKDDSIDNKVLTRSDKNRGKSDNVPSEEVVKKMKNYWRQLLNAK
LITQRKFDNLTKAERGGLSELDKAGFIKRQLVETRQITKHVAQILDSRMNTKYDENDKLIREVK
VITLKSKLVSDFRKDFQFYKVREINNYHHAHDAYLNAVVGTALIKKYPKLESEFVYGDYKVYDV
RKMIAKSEQEIGKATAKYFFYSNIMNFFKTEITLANGEIRKRPLIETNGETGEIVWDKGRDFAT
VRKVLSMPQVNIVKKTEVQTGGFSKESILPKRNSDKLIARKKDWDPKKYGGFDSPTVAYSVLVV
AKVEKGKSKKLKSVKELLGITIMERSSFEKNPIDFLEAKGYKEVKKDLIIKLPKYSLFELENGR
KRMLASAGELQKGNELALPSKYVNFLYLASHYEKLKGSPEDNEQKQLFVEQHKHYLDEIIEQIS
EFSKRVILADANLDKVLSAYNKHRDKPIREQAENIIHLFTLTNLGAPAAFKYFDTTIDRKRYTS
TKEVLDATLIHQSITGLYETRIDLSQLGGDEGADKRTADGSEFESPKKKRKV*
ABE8.17-d
(SEQ ID NO: 261)
MSEVEFSHEYWMRHALTLAKRAWDEREVPVGAVLVHNNRVIGEGWNRPIGRHDPTAHAEIMALR
QGGLVMQNYRLIDATLYVTLEPCVMCAGAMIHSRIGRVVFGARDAKTGAAGSLMDVLHHPGMNH
RVEITEGILADECAALLSDFFRMRRQEIKAQKKAQSSTDSGGSSGGSSGSETPGTSESATPESS
GGSSGGSSEVEFSHEYWMRHALTLAKRARDEREVPVGAVLVLNNRVIGEGWNRAIGLHDPTAHA
EIMALRQGGLVMQNYRLIDATLYSTFEPCVMCAGAMIHSRIGRVVFGVRNAKTGAAGSLMDVLH
YPGMNHRVEITEGILADECAALLCYEFRMPRRVFNAQKKAQSSTDSGGSSGGSSGSETPGRSES
ATRESSGGSSGGSDKKYSIGLAIGTNSVGWAVITDEYKVPSKKFKVLGNTDRHSIKKNLIGALL
FDSGETAEATRLKRTARRRYTRRKNRICYLQEIFSNEMAKVDDSFFHRLEESFLVEEDKKHERH
PIFGNIVDEVAYHEKYPTIYHLRKKLVDSTDKADLRLIYLALAHMIKFRGHFLIEGDLNPDNSD
VDKLFIQLVQTYNQLFEENPINASGVDAKAILSARLSKSRRLENLIAQLPGEKKNGLFGNLIAL
SLGLTPNFKSNFDLAEDAKLQLSKDTYDDDLDNLLAQIGDQYADLFLAAKNLSDAILLSDILRV
NTEITKAPLSASMIKRYDEHHQDLTLLKALVRQQLPEKYKEIFFDQSKNGYAGYIDGGASQEEF
YKFIKPILEKMDGTEELLVKLNREDLLRKQRTFDNGSIPHQIHLGELHAILRRQEDFYPFLKDN
REKIEKILTFRIPYYVGPLARGNSRFAWMTRKSEETITPWNFEEVVDKGASAQSFIERMTNFDK
NLPNEKVLPKHSLLYEYFTVYNELTKVKYVTEGMRKPAFLSGEQKKAIVDLLFKTNRKVTVKQL
KEDYFKKIECFDSVEISGVEDRFNASLGTYHDLLKIIKDKDFLDNEENEDILEDIVLTLTLFED
REMIEERLKTYAHLFDDKVMKQLKRRRYTGWGRLSRKLINGIRDKQSGKTILDFLKSDGFANRN
FMQLIHDDSLTFKEDIQKAQVSGQGDSLHEHIANLAGSPAIKKGILQTVKVVDELVKVMGRHKP
ENIVIEMARENQTTQKGQKNSRERMKRIEEGIKELGSQILKEHPVENTQLQNEKLYLYYLQNGR
DMYVDQELDINRLSDYDVDHIVPQSFLKDDSIDNKVLTRSDKNRGKSDNVPSEEVVKKMKNYWR
QLLNAKLITQRKFDNLTKAERGGLSELDKAGFIKRQLVETRQITKHVAQILDSRMNTKYDENDK
LIREVKVITLKSKLVSDFRKDFQFYKVREINNYHHAHDAYLNAVVGTALIKKYPKLESEFVYGD
YKVYDVRKMIAKSEQEIGKATAKYFFYSNIMNFFKTEITLANGEIRKRPLIETNGETGEIVWDK
GRDFATVRKVLSMPQVNIVKKTEVQTGGFSKESILPKRNSDKLIARKKDWDPKKYGGFDSPTVA
YSVLVVAKVEKGKSKKLKSVKELLGITIMERSSFEKNPIDFLEAKGYKEVKKDLIIKLPKYSLF
ELENGRKRMLASAGELQKGNELALPSKYVNFLYLASHYEKLKGSPEDNEQKQLFVEQHKHYLDE
IIEQISEFSKRVILADANLDKVLSAYNKHRDKPIREQAENIIHLFTLTNLGAPAAFKYFDTTID
RKRYTSTKEVLDATLIHQSITGLYETRIDLSQLGGDEGADKRTADGSEFESPKKKRKV*
ABE8.20-m
(SEQ ID NO: 262)
MSEVEFSHEYWMRHALTLAKRARDEREVPVGAVLVLNNRVIGEGWNRAIGLHDPTAHAEIMALR
QGGLVMQNYRLYDATLYSTFEPCVMCAGAMIHSRIGRVVFGVRNAKTGAAGSLMDVLHHPGMNH
RVEITEGILADECAALLCRFFRMPRRVFNAQKKAQSSTDSGGSSGGSSGSETPGTSESATPESS
GGSSGGSDKKYSIGLAIGTNSVGWAVITDEYKVPSKKFKVLGNTDRHSIKKNLIGALLFDSGET
AEATRLKRTARRRYTRRKNRICYLQEIFSNEMAKVDDSFFHRLEESFLVEEDKKHERHPIFGNI
VDEVAYHEKYPTIYHLRKKLVDSTDKADLRLIYLALAHMIKFRGHFLIEGDLNPDNSDVDKLFI
QLVQTYNQLFEENPINASGVDAKAILSARLSKSRRLENLIAQLPGEKKNGLFGNLIALSLGLTP
NFKSNFDLAEDAKLQLSKDTYDDDLDNLLAQIGDQYADLFLAAKNLSDAILLSDILRVNTEITK
APLSASMIKRYDEHHQDLTLLKALVRQQLPEKYKEIFFDQSKNGYAGYIDGGASQEEFYKFIKP
ILEKMDGTEELLVKLNREDLLRKQRTFDNGSIPHQIHLGELHAILRRQEDFYPFLKDNREKIEK
ILTFRIPYYVGPLARGNSRFAWMTRKSEETITPWNFEEVVDKGASAQSFIERMTNFDKNLPNEK
VLPKHSLLYEYFTVYNELTKVKYVTEGMRKPAFLSGEQKKAIVDLLFKTNRKVTVKQLKEDYFK
KIECFDSVEISGVEDRFNASLGTYHDLLKIIKDKDFLDNEENEDILEDIVLTLTLFEDREMIEE
RLKTYAHLFDDKVMKQLKRRRYTGWGRLSRKLINGIRDKQSGKTILDFLKSDGFANRNFMQLIH
DDSLTFKEDIQKAQVSGQGDSLHEHIANLAGSPAIKKGILQTVKVVDELVKVMGRHKPENIVIE
MARENQTTQKGQKNSRERMKRIEEGIKELGSQILKEHPVENTQLQNEKLYLYYLQNGRDMYVDQ
ELDINRLSDYDVDHIVPQSFLKDDSIDNKVLTRSDKNRGKSDNVPSEEVVKKMKNYWRQLLNAK
LITQRKFDNLTKAERGGLSELDKAGFIKRQLVETRQITKHVAQILDSRMNTKYDENDKLIREVK
VITLKSKLVSDFRKDFQFYKVREINNYHHAHDAYLNAVVGTALIKKYPKLESEFVYGDYKVYDV
RKMIAKSEQEIGKATAKYFFYSNIMNFFKTEITLANGEIRKRPLIETNGETGEIVWDKGRDFAT
VRKVLSMPQVNIVKKTEVQTGGFSKESILPKRNSDKLIARKKDWDPKKYGGFDSPTVAYSVLVV
AKVEKGKSKKLKSVKELLGITIMERSSFEKNPIDFLEAKGYKEVKKDLIIKLPKYSLFELENGR
KRMLASAGELQKGNELALPSKYVNFLYLASHYEKLKGSPEDNEQKQLFVEQHKHYLDEIIEQIS
EFSKRVILADANLDKVLSAYNKHRDKPIREQAENIIHLFTLTNLGAPAAFKYFDTTIDRKRYTS
TKEVLDATLIHQSITGLYETRIDLSQLGGDEGADKRTADGSEFESPKKKRKV*
ABE8.20-d
(SEQ ID NO: 263)
MSEVEFSHEYWMRHALTLAKRAWDEREVPVGAVLVHNNRVIGEGWNRPIGRHDPTAHAEIMALR
QGGLVMQNYRLIDATLYVTLEPCVMCAGAMIHSRIGRVVFGARDAKTGAAGSLMDVLHHPGMNH
RVEITEGILADECAALLSDFFRMRRQEIKAQKKAOSSTDSGGSSGGSSGSETPGTSESATPESS
GGSSGGSSEVEFSHEYWMRHALTLAKRARDEREVPVGAVLVLNNRVIGEGWNRAIGLHDPTAHA
EIMALRQGGLVMQNYRLYDATLYSTFEPCVMCAGAMIHSRIGRVVFGVRNAKTGAAGSLMDVLH
HPGMNHRVEITEGILADECAALLCRFFRMPRRVFNAQKKAQSSTDSGGSSGGSSGSETPGTSES
ATPESSGGSSGGSDKKYSIGLAIGTNSVGWAVITDEYKVPSKKFKVLGNTDRHSIKKNLIGALL
FDSGETAEATRLKRTARRRYTRRKNRICYLQEIFSNEMAKVDDSFFHRLEESFLVEEDKKHERH
PIFGNIVDEVAYHEKYPTIYHLRKKLVDSTDKADLRLIYLALAHMIKFRGHFLIEGDLNPDNSD
VDKLFIQLVQTYNQLFEENPINASGVDAKAILSARLSKSRRLENLIAQLPGEKKNGLFGNLIAL
SLGLTPNFKSNFDLAEDAKLQLSKDTYDDDLDNLLAQIGDQYADLFLAAKNLSDAILLSDILRV
NTEITKAPLSASMIKRYDEHHQDLTLLKALVRQQLPEKYKEIFFDQSKNGYAGYIDGGASQEEF
YKFIKPILEKMDGTEELLVKLNREDLLRKQRTFDNGSIPHQIHLGELHAILRRQEDFYPFLKDN
REKIEKILTFRIPYYVGPLARGNSRFAWMTRKSEETITPWNFEEVVDKGASAQSFIERMTNFDK
NLPNEKVLPKHSLLYEYFTVYNELTKVKYVTEGMRKPAFLSGEQKKAIVDLLFKTNRKVTVKQL
KEDYFKKIECFDSVEISGVEDRFNASLGTYHDLLKIIKDKDFLDNEENEDILEDIVLTLTLFED
REMIEERLKTYAHLFDDKVMKQLKRRRYTGWGRLSRKLINGIRDKQSGKTILDFLKSDGFANRN
FMQLIHDDSLTFKEDIQKAQVSGQGDSLHEHIANLAGSPAIKKGILQTVKVVDELVKVMGRHKP
ENIVIEMARENQTTQKGQKNSRERMKRIEEGIKELGSQILKEHPVENTQLQNEKLYLYYLQNGR
DMYVDQELDINRLSDYDVDHIVPQSFLKDDSIDNKVLTRSDKNRGKSDNVPSEEVVKKMKNYWR
QLLNAKLITQRKFDNLTKAERGGLSELDKAGFIKRQLVETRQITKHVAQILDSRMNTKYDENDK
LIREVKVITLKSKLVSDFRKDFQFYKVREINNYHHAHDAYLNAVVGTALIKKYPKLESEFVYGD
YKVYDVRKMIAKSEQEIGKATAKYFFYSNIMNFFKTEITLANGEIRKRPLIETNGETGEIVWDK
GRDFATVRKVLSMPQVNIVKKTEVQTGGFSKESILPKRNSDKLIARKKDWDPKKYGGFDSPTVA
YSVLVVAKVEKGKSKKLKSVKELLGITIMERSSFEKNPIDFLEAKGYKEVKKDLIIKLPKYSLF
ELENGRKRMLASAGELQKGNELALPSKYVNFLYLASHYEKLKGSPEDNEQKQLFVEQHKHYLDE
IIEQISEFSKRVILADANLDKVLSAYNKHRDKPIREQAENIIHLFTLTNLGAPAAFKYFDTTID
RKRYTSTKEVLDATLIHQSITGLYETRIDLSQLGGDEGADKRTADGSEFESPKKKRKV*
01. monoABE8.1_bpNLS + Y147T
(SEQ ID NO: 264)
MSEVEFSHEYWMRHALTLAKRARDEREVPVGAVLVLNNRVIGEGWNRAIGLHDPTAHAEIMALR
QGGLVMQNYRLIDATLYVTFEPCVMCAGAMIHSRIGRVVFGVRNAKTGAAGSLMDVLHYPGMNH
RVEITEGILADECAALLCTFFRMPRQVFNAQKKAQSSTDSGGSSGGSSGSETPGTSESATPESS
GGSSGGSDKKYSIGLAIGTNSVGWAVITDEYKVPSKKFKVLGNTDRHSIKKNLIGALLFDSGET
AEATRLKRTARRRYTRRKNRICYLQEIFSNEMAKVDDSFFHRLEESFLVEEDKKHERHPIFGNI
VDEVAYHEKYPTIYHLRKKLVDSTDKADLRLIYLALAHMIKFRGHFLIEGDLNPDNSDVDKLFI
QLVQTYNQLFEENPINASGVDAKAILSARLSKSRRLENLIAQLPGEKKNGLFGNLIALSLGLTP
NFKSNFDLAEDAKLQLSKDTYDDDLDNLLAQIGDQYADLFLAAKNLSDAILLSDILRVNTEITK
APLSASMIKRYDEHHQDLTLLKALVRQQLPEKYKEIFFDQSKNGYAGYIDGGASQEEFYKFIKP
ILEKMDGTEELLVKLNREDLLRKQRTFDNGSIPHQIHLGELHAILRRQEDFYPFLKDNREKIEK
ILTFRIPYYVGPLARGNSRFAWMTRKSEETITPWNFEEVVDKGASAQSFIERMTNFDKNLPNEK
VLPKHSLLYEYFTVYNELTKVKYVTEGMRKPAFLSGEQKKAIVDLLFKTNRKVTVKQLKEDYFK
KIECFDSVEISGVEDRFNASLGTYHDLLKIIKDKDFLDNEENEDILEDIVLTLTLFEDREMIEE
RLKTYAHLFDDKVMKQLKRRRYTGWGRLSRKLINGIRDKQSGKTILDFLKSDGFANRNFMQLIH
DDSLTFKEDIQKAQVSGQGDSLHEHIANLAGSPAIKKGILQTVKVVDELVKVMGRHKPENIVIE
MARENQTTQKGQKNSRERMKRIEEGIKELGSQILKEHPVENTQLQNEKLYLYYLQNGRDMYVDQ
ELDINRLSDYDVDHIVPQSFLKDDSIDNKVLTRSDKNRGKSDNVPSEEVVKKMKNYWRQLLNAK
LITQRKFDNLTKAERGGLSELDKAGFIKRQLVETRQITKHVAQILDSRMNTKYDENDKLIREVK
VITLKSKLVSDFRKDFQFYKVREINNYHHAHDAYLNAVVGTALIKKYPKLESEFVYGDYKVYDV
RKMIAKSEQEIGKATAKYFFYSNIMNFFKTEITLANGEIRKRPLIETNGETGEIVWDKGRDFAT
VRKVLSMPQVNIVKKTEVQTGGFSKESILPKRNSDKLIARKKDWDPKKYGGFVSPTVAYSVLVV
AKVEKGKSKKLKSVKELLGITIMERSSFEKNPIDFLEAKGYKEVKKDLIIKLPKYSLFELENGR
KRMLASARELQKGNELALPSKYVNFLYLASHYEKLKGSPEDNEQKQLFVEQHKHYLDEIIEQIS
EFSKRVILADANLDKVLSAYNKHRDKPIREQAENIIHLFTLTNLGAPAAFKYFDTTIDRKQYRS
TKEVLDATLIHQSITGLYETRIDLSQLGGDEGADKRTADGSEFESPKKKRKV
02. monoABE8.1_bpNLS + Y147R
(SEQ ID NO: 265)
MSEVEFSHEYWMRHALTLAKRARDEREVPVGAVLVLNNRVIGEGWNRAIGLHDPTAHAEIMALR
QGGLVMQNYRLIDATLYVTFEPCVMCAGAMIHSRIGRVVFGVRNAKTGAAGSLMDVLHYPGMNH
RVEITEGILADECAALLCRFFRMPRQVFNAQKKAQSSTDSGGSSGGSSGSETPGTSESATPESS
GGSSGGSDKKYSIGLAIGTNSVGWAVITDEYKVPSKKFKVLGNTDRHSIKKNLIGALLFDSGET
AEATRLKRTARRRYTRRKNRICYLQEIFSNEMAKVDDSFFHRLEESFLVEEDKKHERHPIFGNI
VDEVAYHEKYPTIYHLRKKLVDSTDKADLRLIYLALAHMIKFRGHFLIEGDLNPDNSDVDKLFI
QLVQTYNQLFEENPINASGVDAKAILSARLSKSRRLENLIAQLPGEKKNGLFGNLIALSLGLTP
NFKSNFDLAEDAKLQLSKDTYDDDLDNLLAQIGDQYADLFLAAKNLSDAILLSDILRVNTEITK
APLSASMIKRYDEHHQDLTLLKALVRQQLPEKYKEIFFDQSKNGYAGYIDGGASQEEFYKFIKP
ILEKMDGTEELLVKLNREDLLRKQRTFDNGSIPHQIHLGELHAILRRQEDFYPFLKDNREKIEK
ILTFRIPYYVGPLARGNSRFAWMTRKSEETITPWNFEEVVDKGASAQSFIERMTNFDKNLPNEK
VLPKHSLLYEYFTVYNELTKVKYVTEGMRKPAFLSGEQKKAIVDLLFKTNRKVTVKQLKEDYFK
KIECFDSVEISGVEDRFNASLGTYHDLLKIIKDKDFLDNEENEDILEDIVLTLTLFEDREMIEE
RLKTYAHLFDDKVMKQLKRRRYTGWGRLSRKLINGIRDKQSGKTILDFLKSDGFANRNFMQLIH
DDSLTFKEDIQKAQVSGQGDSLHEHIANLAGSPAIKKGILQTVKVVDELVKVMGRHKPENIVIE
MARENQTTQKGQKNSRERMKRIEEGIKELGSQILKEHPVENTQLQNEKLYLYYLQNGRDMYVDQ
ELDINRLSDYDVDHIVPQSFLKDDSIDNKVLTRSDKNRGKSDNVPSEEVVKKMKNYWRQLLNAK
LITQRKFDNLTKAERGGLSELDKAGFIKRQLVETRQITKHVAQILDSRMNTKYDENDKLIREVK
VITLKSKLVSDFRKDFQFYKVREINNYHHAHDAYLNAVVGTALIKKYPKLESEFVYGDYKVYDV
RKMIAKSEQEIGKATAKYFFYSNIMNFFKTEITLANGEIRKRPLIETNGETGEIVWDKGRDFAT
VRKVLSMPQVNIVKKTEVQTGGFSKESILPKRNSDKLIARKKDWDPKKYGGFVSPTVAYSVLVV
AKVEKGKSKKLKSVKELLGITIMERSSFEKNPIDFLEAKGYKEVKKDLIIKLPKYSLFELENGR
KRMLASARELQKGNELALPSKYVNFLYLASHYEKLKGSPEDNEQKQLFVEQHKHYLDEIIEQIS
EFSKRVILADANLDKVLSAYNKHRDKPIREQAENIIHLFTLTNLGAPAAFKYFDTTIDRKQYRS
TKEVLDATLIHQSITGLYETRIDLSQLGGDEGADKRTADGSEFESPKKKRKV
03. monoABE8.1_bpNLS + Q154S
(SEQ ID NO: 266)
MSEVEFSHEYWMRHALTLAKRARDEREVPVGAVLVLNNRVIGEGWNRAIGLHDPTAHAEIMALR
QGGLVMQNYRLIDATLYVTFEPCVMCAGAMIHSRIGRVVFGVRNAKTGAAGSLMDVLHYPGMNH
RVEITEGILADECAALLCYFFRMPRSVFNAQKKAQSSTDSGGSSGGSSGSETPGTSESATPESS
GGSSGGSDKKYSIGLAIGTNSVGWAVITDEYKVPSKKFKVLGNTDRHSIKKNLIGALLFDSGET
AEATRLKRTARRRYTRRKNRICYLQEIFSNEMAKVDDSFFHRLEESFLVEEDKKHERHPIFGNI
VDEVAYHEKYPTIYHLRKKLVDSTDKADLRLIYLALAHMIKFRGHFLIEGDLNPDNSDVDKLFI
QLVQTYNQLFEENPINASGVDAKAILSARLSKSRRLENLIAQLPGEKKNGLFGNLIALSLGLTP
NFKSNFDLAEDAKLQLSKDTYDDDLDNLLAQIGDQYADLFLAAKNLSDAILLSDILRVNTEITK
APLSASMIKRYDEHHQDLTLLKALVRQQLPEKYKEIFFDQSKNGYAGYIDGGASQEEFYKFIKP
ILEKMDGTEELLVKLNREDLLRKQRTFDNGSIPHQIHLGELHAILRRQEDFYPFLKDNREKIEK
ILTFRIPYYVGPLARGNSRFAWMTRKSEETITPWNFEEVVDKGASAQSFIERMTNFDKNLPNEK
VLPKHSLLYEYFTVYNELTKVKYVTEGMRKPAFLSGEQKKAIVDLLFKTNRKVTVKQLKEDYFK
KIECFDSVEISGVEDRFNASLGTYHDLLKIIKDKDFLDNEENEDILEDIVLTLTLFEDREMIEE
RLKTYAHLFDDKVMKQLKRRRYTGWGRLSRKLINGIRDKQSGKTILDFLKSDGFANRNFMQLIH
DDSLTFKEDIQKAQVSGQGDSLHEHIANLAGSPAIKKGILQTVKVVDELVKVMGRHKPENIVIE
MARENQTTQKGQKNSRERMKRIEEGIKELGSQILKEHPVENTQLQNEKLYLYYLQNGRDMYVDQ
ELDINRLSDYDVDHIVPQSFLKDDSIDNKVLTRSDKNRGKSDNVPSEEVVKKMKNYWRQLLNAK
LITQRKFDNLTKAERGGLSELDKAGFIKRQLVETRQITKHVAQILDSRMNTKYDENDKLIREVK
VITLKSKLVSDFRKDFQFYKVREINNYHHAHDAYLNAVVGTALIKKYPKLESEFVYGDYKVYDV
RKMIAKSEQEIGKATAKYFFYSNIMNFFKTEITLANGEIRKRPLIETNGETGEIVWDKGRDFAT
VRKVLSMPQVNIVKKTEVQTGGFSKESILPKRNSDKLIARKKDWDPKKYGGFVSPTVAYSVLVV
AKVEKGKSKKLKSVKELLGITIMERSSFEKNPIDELEAKGYKEVKKDLIIKLPKYSLEELENGR
KRMLASARELQKGNELALPSKYVNFLYLASHYEKLKGSPEDNEQKQLFVEQHKHYLDEIIEQIS
EFSKRVILADANLDKVLSAYNKHRDKPIREQAENIIHLFTLTNLGAPAAFKYFDTTIDRKQYRS
TKEVLDATLIHQSITGLYETRIDLSQLGGDEGADKRTADGSEFESPKKKRKV
04. monoABE8.1_bpNLS + Y123H
(SEQ ID NO: 267)
MSEVEFSHEYWMRHALTLAKRARDEREVPVGAVLVLNNRVIGEGWNRAIGLHDPTAHAEIMALR
QGGLVMQNYRLIDATLYVTFEPCVMCAGAMIHSRIGRVVFGVRNAKTGAAGSLMDVLHHPGMNH
RVEITEGILADECAALLCYFFRMPRQVFNAQKKAQSSTDSGGSSGGSSGSETPGTSESATPESS
GGSSGGSDKKYSIGLAIGTNSVGWAVITDEYKVPSKKFKVLGNTDRHSIKKNLIGALLFDSGET
AEATRLKRTARRRYTRRKNRICYLQEIFSNEMAKVDDSFFHRLEESFLVEEDKKHERHPIFGNI
VDEVAYHEKYPTIYHLRKKLVDSTDKADLRLIYLALAHMIKFRGHFLIEGDLNPDNSDVDKLFI
QLVQTYNQLFEENPINASGVDAKAILSARLSKSRRLENLIAQLPGEKKNGLFGNLIALSLGLTP
NFKSNFDLAEDAKLQLSKDTYDDDLDNLLAQIGDQYADLFLAAKNLSDAILLSDILRVNTEITK
APLSASMIKRYDEHHQDLTLLKALVRQQLPEKYKEIFFDQSKNGYAGYIDGGASQEEFYKFIKP
ILEKMDGTEELLVKLNREDLLRKQRTFDNGSIPHQIHLGELHAILRRQEDFYPFLKDNREKIEK
ILTFRIPYYVGPLARGNSRFAWMTRKSEETITPWNFEEVVDKGASAQSFIERMTNFDKNLPNEK
VLPKHSLLYEYFTVYNELTKVKYVTEGMRKPAFLSGEQKKAIVDLLFKTNRKVTVKQLKEDYFK
KIECFDSVEISGVEDRFNASLGTYHDLLKIIKDKDFLDNEENEDILEDIVLTLTLFEDREMIEE
RLKTYAHLFDDKVMKQLKRRRYTGWGRLSRKLINGIRDKQSGKTILDFLKSDGFANRNFMQLIH
DDSLTFKEDIQKAQVSGQGDSLHEHIANLAGSPAIKKGILQTVKVVDELVKVMGRHKPENIVIE
MARENQTTQKGQKNSRERMKRIEEGIKELGSQILKEHPVENTQLQNEKLYLYYLQNGRDMYVDQ
ELDINRLSDYDVDHIVPQSFLKDDSIDNKVLTRSDKNRGKSDNVPSEEVVKKMKNYWRQLLNAK
LITQRKFDNLTKAERGGLSELDKAGFIKRQLVETRQITKHVAQILDSRMNTKYDENDKLIREVK
VITLKSKLVSDFRKDFQFYKVREINNYHHAHDAYLNAVVGTALIKKYPKLESEFVYGDYKVYDV
RKMIAKSEQEIGKATAKYFFYSNIMNFFKTEITLANGEIRKRPLIETNGETGEIVWDKGRDFAT
VRKVLSMPQVNIVKKTEVQTGGFSKESILPKRNSDKLIARKKDWDPKKYGGFVSPTVAYSVLVV
AKVEKGKSKKLKSVKELLGITIMERSSFEKNPIDFLEAKGYKEVKKDLIIKLPKYSLFELENGR
KRMLASARELQKGNELALPSKYVNFLYLASHYEKLKGSPEDNEQKQLFVEQHKHYLDEIIEQIS
EFSKRVILADANLDKVLSAYNKHRDKPIREQAENIIHLFTLTNLGAPAAFKYFDTTIDRKQYRS
TKEVLDATLIHQSITGLYETRIDLSQLGGDEGADKRTADGSEFESPKKKRKV
05. monoABE8.1_bpNLS + V82S
(SEQ ID NO: 268)
MSEVEFSHEYWMRHALTLAKRARDEREVPVGAVLVLNNRVIGEGWNRAIGLHDPTAHAEIMALR
QGGLVMQNYRLIDATLYSTFEPCVMCAGAMIHSRIGRVVFGVRNAKTGAAGSLMDVLHYPGMNH
RVEITEGILADECAALLCYFFRMPRQVFNAQKKAQSSTDSGGSSGGSSGSETPGTSESATPESS
GGSSGGSDKKYSIGLAIGTNSVGWAVITDEYKVPSKKFKVLGNTDRHSIKKNLIGALLFDSGET
AEATRLKRTARRRYTRRKNRICYLQEIFSNEMAKVDDSFFHRLEESFLVEEDKKHERHPIFGNI
VDEVAYHEKYPTIYHLRKKLVDSTDKADLRLIYLALAHMIKFRGHFLIEGDLNPDNSDVDKLFI
QLVQTYNQLFEENPINASGVDAKAILSARLSKSRRLENLIAQLPGEKKNGLFGNLIALSLGLTP
NFKSNFDLAEDAKLQLSKDTYDDDLDNLLAQIGDQYADLFLAAKNLSDAILLSDILRVNTEITK
APLSASMIKRYDEHHQDLTLLKALVRQQLPEKYKEIFFDQSKNGYAGYIDGGASQEEFYKFIKP
ILEKMDGTEELLVKLNREDLLRKQRTFDNGSIPHQIHLGELHAILRRQEDFYPFLKDNREKIEK
ILTFRIPYYVGPLARGNSRFAWMTRKSEETITPWNFEEVVDKGASAQSFIERMTNFDKNLPNEK
VLPKHSLLYEYFTVYNELTKVKYVTEGMRKPAFLSGEQKKAIVDLLFKTNRKVTVKQLKEDYFK
KIECFDSVEISGVEDRFNASLGTYHDLLKIIKDKDFLDNEENEDILEDIVLTLTLFEDREMIEE
RLKTYAHLFDDKVMKQLKRRRYTGWGRLSRKLINGIRDKQSGKTILDFLKSDGFANRNFMQLIH
DDSLTFKEDIQKAQVSGQGDSLHEHIANLAGSPAIKKGILQTVKVVDELVKVMGRHKPENIVIE
MARENQTTQKGQKNSRERMKRIEEGIKELGSQILKEHPVENTQLQNEKLYLYYLQNGRDMYVDQ
ELDINRLSDYDVDHIVPQSFLKDDSIDNKVLTRSDKNRGKSDNVPSEEVVKKMKNYWRQLLNAK
LITQRKFDNLTKAERGGLSELDKAGFIKRQLVETRQITKHVAQILDSRMNTKYDENDKLIREVK
VITLKSKLVSDFRKDFQFYKVREINNYHHAHDAYLNAVVGTALIKKYPKLESEFVYGDYKVYDV
RKMIAKSEQEIGKATAKYFFYSNIMNFFKTEITLANGEIRKRPLIETNGETGEIVWDKGRDFAT
VRKVLSMPQVNIVKKTEVQTGGFSKESILPKRNSDKLIARKKDWDPKKYGGFVSPTVAYSVLVV
AKVEKGKSKKLKSVKELLGITIMERSSFEKNPIDFLEAKGYKEVKKDLIIKLPKYSLFELENGR
KRMLASARELQKGNELALPSKYVNFLYLASHYEKLKGSPEDNEQKQLFVEQHKHYLDEIIEQIS
EFSKRVILADANLDKVLSAYNKHRDKPIREQAENIIHLFTLTNLGAPAAFKYFDTTIDRKQYRS
TKEVLDATLIHQSITGLYETRIDLSQLGGDEGADKRTADGSEFESPKKKRKV
06. monoABE8.1_bpNLS + T166R
(SEQ ID NO: 269)
MSEVEFSHEYWMRHALTLAKRARDEREVPVGAVLVLNNRVIGEGWNRAIGLHDPTAHAEIMALR
QGGLVMQNYRLIDATLYVTFEPCVMCAGAMIHSRIGRVVFGVRNAKTGAAGSLMDVLHYPGMNH
RVEITEGILADECAALLCYFFRMPRQVFNAQKKAQSSRDSGGSSGGSSGSETPGTSESATPESS
GGSSGGSDKKYSIGLAIGTNSVGWAVITDEYKVPSKKFKVLGNTDRHSIKKNLIGALLFDSGET
AEATRLKRTARRRYTRRKNRICYLQEIFSNEMAKVDDSFFHRLEESFLVEEDKKHERHPIFGNI
VDEVAYHEKYPTIYHLRKKLVDSTDKADLRLIYLALAHMIKFRGHFLIEGDLNPDNSDVDKLFI
QLVQTYNQLFEENPINASGVDAKAILSARLSKSRRLENLIAQLPGEKKNGLFGNLIALSLGLTP
NFKSNFDLAEDAKLQLSKDTYDDDLDNLLAQIGDQYADLFLAAKNLSDAILLSDILRVNTEITK
APLSASMIKRYDEHHQDLTLLKALVRQQLPEKYKEIFFDQSKNGYAGYIDGGASQEEFYKFIKP
ILEKMDGTEELLVKLNREDLLRKQRTFDNGSIPHQIHLGELHAILRRQEDFYPFLKDNREKIEK
ILTFRIPYYVGPLARGNSRFAWMTRKSEETITPWNFEEVVDKGASAQSFIERMTNFDKNLPNEK
VLPKHSLLYEYFTVYNELTKVKYVTEGMRKPAFLSGEQKKAIVDLLFKTNRKVTVKQLKEDYFK
KIECFDSVEISGVEDRFNASLGTYHDLLKIIKDKDFLDNEENEDILEDIVLTLTLFEDREMIEE
RLKTYAHLFDDKVMKQLKRRRYTGWGRLSRKLINGIRDKQSGKTILDFLKSDGFANRNFMQLIH
DDSLTFKEDIQKAQVSGQGDSLHEHIANLAGSPAIKKGILQTVKVVDELVKVMGRHKPENIVIE
MARENQTTQKGQKNSRERMKRIEEGIKELGSQILKEHPVENTQLQNEKLYLYYLQNGRDMYVDQ
ELDINRLSDYDVDHIVPQSFLKDDSIDNKVLTRSDKNRGKSDNVPSEEVVKKMKNYWRQLLNAK
LITQRKFDNLTKAERGGLSELDKAGFIKRQLVETRQITKHVAQILDSRMNTKYDENDKLIREVK
VITLKSKLVSDFRKDFQFYKVREINNYHHAHDAYLNAVVGTALIKKYPKLESEFVYGDYKVYDV
RKMIAKSEQEIGKATAKYFFYSNIMNFFKTEITLANGEIRKRPLIETNGETGEIVWDKGRDFAT
VRKVLSMPQVNIVKKTEVQTGGFSKESILPKRNSDKLIARKKDWDPKKYGGFVSPTVAYSVLVV
AKVEKGKSKKLKSVKELLGITIMERSSFEKNPIDFLEAKGYKEVKKDLIIKLPKYSLFELENGR
KRMLASARELQKGNELALPSKYVNFLYLASHYEKLKGSPEDNEQKQLFVEQHKHYLDEIIEQIS
EFSKRVILADANLDKVLSAYNKHRDKPIREQAENIIHLFTLTNLGAPAAFKYFDTTIDRKQYRS
TKEVLDATLIHQSITGLYETRIDLSQLGGDEGADKRTADGSEFESPKKKRKV
07. monoABE8.1_bpNLS + Q154R
(SEQ ID NO: 270)
MSEVEFSHEYWMRHALTLAKRARDEREVPVGAVLVLNNRVIGEGWNRAIGLHDPTAHAEIMALR
QGGLVMQNYRLIDATLYVTFEPCVMCAGAMIHSRIGRVVFGVRNAKTGAAGSLMDVLHYPGMNH
RVEITEGILADECAALLCYFFRMPRRVFNAQKKAQSSTDSGGSSGGSSGSETPGTSESATPESS
GGSSGGSDKKYSIGLAIGTNSVGWAVITDEYKVPSKKFKVLGNTDRHSIKKNLIGALLFDSGET
AEATRLKRTARRRYTRRKNRICYLQEIFSNEMAKVDDSFFHRLEESFLVEEDKKHERHPIFGNI
VDEVAYHEKYPTIYHLRKKLVDSTDKADLRLIYLALAHMIKFRGHFLIEGDLNPDNSDVDKLFI
QLVQTYNQLFEENPINASGVDAKAILSARLSKSRRLENLIAQLPGEKKNGLFGNLIALSLGLTP
NFKSNFDLAEDAKLQLSKDTYDDDLDNLLAQIGDQYADLFLAAKNLSDAILLSDILRVNTEITK
APLSASMIKRYDEHHQDLTLLKALVRQQLPEKYKEIFFDQSKNGYAGYIDGGASQEEFYKFIKP
ILEKMDGTEELLVKLNREDLLRKQRTFDNGSIPHQIHLGELHAILRRQEDFYPFLKDNREKIEK
ILTFRIPYYVGPLARGNSRFAWMTRKSEETITPWNFEEVVDKGASAQSFIERMTNFDKNLPNEK
VLPKHSLLYEYFTVYNELTKVKYVTEGMRKPAFLSGEQKKAIVDLLFKTNRKVTVKQLKEDYFK
KIECFDSVEISGVEDRFNASLGTYHDLLKIIKDKDFLDNEENEDILEDIVLTLTLFEDREMIEE
RLKTYAHLFDDKVMKQLKRRRYTGWGRLSRKLINGIRDKQSGKTILDFLKSDGFANRNFMQLIH
DDSLTFKEDIQKAQVSGQGDSLHEHIANLAGSPAIKKGILQTVKVVDELVKVMGRHKPENIVIE
MARENQTTQKGQKNSRERMKRIEEGIKELGSQILKEHPVENTQLQNEKLYLYYLQNGRDMYVDQ
ELDINRLSDYDVDHIVPQSFLKDDSIDNKVLTRSDKNRGKSDNVPSEEVVKKMKNYWRQLLNAK
LITQRKFDNLTKAERGGLSELDKAGFIKRQLVETRQITKHVAQILDSRMNTKYDENDKLIREVK
VITLKSKLVSDFRKDFQFYKVREINNYHHAHDAYLNAVVGTALIKKYPKLESEFVYGDYKVYDV
RKMIAKSEQEIGKATAKYFFYSNIMNFFKTEITLANGEIRKRPLIETNGETGEIVWDKGRDFAT
VRKVLSMPQVNIVKKTEVQTGGFSKESILPKRNSDKLIARKKDWDPKKYGGFVSPTVAYSVLVV
AKVEKGKSKKLKSVKELLGITIMERSSFEKNPIDFLEAKGYKEVKKDLIIKLPKYSLFELENGR
KRMLASARELQKGNELALPSKYVNFLYLASHYEKLKGSPEDNEQKQLFVEQHKHYLDEIIEQIS
EFSKRVILADANLDKVLSAYNKHRDKPIREQAENIIHLFTLTNLGAPAAFKYFDTTIDRKQYRS
TKEVLDATLIHQSITGLYETRIDLSQLGGDEGADKRTADGSEFESPKKKRKV
08. monoABE8.1_bpNLS + Y147R_Q154R_Y123H
(SEQ ID NO: 271)
MSEVEFSHEYWMRHALTLAKRARDEREVPVGAVLVLNNRVIGEGWNRAIGLHDPTAHAEIMALR
QGGLVMQNYRLIDATLYVTFEPCVMCAGAMIHSRIGRVVFGVRNAKTGAAGSLMDVLHHPGMNH
RVEITEGILADECAALLCRFFRMPRRVFNAQKKAQSSTDSGGSSGGSSGSETPGTSESATPESS
GGSSGGSDKKYSIGLAIGTNSVGWAVITDEYKVPSKKFKVLGNTDRHSIKKNLIGALLFDSGET
AEATRLKRTARRRYTRRKNRICYLQEIFSNEMAKVDDSFFHRLEESFLVEEDKKHERHPIFGNI
VDEVAYHEKYPTIYHLRKKLVDSTDKADLRLIYLALAHMIKFRGHFLIEGDLNPDNSDVDKLFI
QLVQTYNQLFEENPINASGVDAKAILSARLSKSRRLENLIAQLPGEKKNGLFGNLIALSLGLTP
NFKSNFDLAEDAKLQLSKDTYDDDLDNLLAQIGDQYADLFLAAKNLSDAILLSDILRVNTEITK
APLSASMIKRYDEHHQDLTLLKALVRQQLPEKYKEIFFDQSKNGYAGYIDGGASQEEFYKFIKP
ILEKMDGTEELLVKLNREDLLRKQRTFDNGSIPHQIHLGELHAILRRQEDFYPFLKDNREKIEK
ILTFRIPYYVGPLARGNSRFAWMTRKSEETITPWNFEEVVDKGASAQSFIERMTNFDKNLPNEK
VLPKHSLLYEYFTVYNELTKVKYVTEGMRKPAFLSGEQKKAIVDLLFKTNRKVTVKQLKEDYFK
KIECFDSVEISGVEDRFNASLGTYHDLLKIIKDKDFLDNEENEDILEDIVLTLTLFEDREMIEE
RLKTYAHLFDDKVMKQLKRRRYTGWGRLSRKLINGIRDKQSGKTILDFLKSDGFANRNFMQLIH
DDSLTFKEDIQKAQVSGQGDSLHEHIANLAGSPAIKKGILQTVKVVDELVKVMGRHKPENIVIE
MARENQTTQKGQKNSRERMKRIEEGIKELGSQILKEHPVENTQLQNEKLYLYYLQNGRDMYVDQ
ELDINRLSDYDVDHIVPQSFLKDDSIDNKVLTRSDKNRGKSDNVPSEEVVKKMKNYWRQLLNAK
LITQRKFDNLTKAERGGLSELDKAGFIKRQLVETRQITKHVAQILDSRMNTKYDENDKLIREVK
VITLKSKLVSDFRKDFQFYKVREINNYHHAHDAYLNAVVGTALIKKYPKLESEFVYGDYKVYDV
RKMIAKSEQEIGKATAKYFFYSNIMNFFKTEITLANGEIRKRPLIETNGETGEIVWDKGRDFAT
VRKVLSMPQVNIVKKTEVQTGGFSKESILPKRNSDKLIARKKDWDPKKYGGFVSPTVAYSVLVV
AKVEKGKSKKLKSVKELLGITIMERSSFEKNPIDELEAKGYKEVKKDLIIKLPKYSLEELENGR
KRMLASARELQKGNELALPSKYVNFLYLASHYEKLKGSPEDNEQKQLFVEQHKHYLDEIIEQIS
EFSKRVILADANLDKVLSAYNKHRDKPIREQAENIIHLFTLTNLGAPAAFKYFDTTIDRKQYRS
TKEVLDATLIHQSITGLYETRIDLSQLGGDEGADKRTADGSEFESPKKKRKV
09. monoABE8.1_bpNLS + Y147R_Q154R_I76Y
(SEQ ID NO: 272)
MSEVEFSHEYWMRHALTLAKRARDEREVPVGAVLVLNNRVIGEGWNRAIGLHDPTAHAEIMALR
QGGLVMQNYRLYDATLYVTFEPCVMCAGAMIHSRIGRVVFGVRNAKTGAAGSLMDVLHYPGMNH
RVEITEGILADECAALLCRFFRMPRRVFNAQKKAQSSTDSGGSSGGSSGSETPGTSESATPESS
GGSSGGSDKKYSIGLAIGTNSVGWAVITDEYKVPSKKFKVLGNTDRHSIKKNLIGALLFDSGET
AEATRLKRTARRRYTRRKNRICYLQEIFSNEMAKVDDSFFHRLEESFLVEEDKKHERHPIFGNI
VDEVAYHEKYPTIYHLRKKLVDSTDKADLRLIYLALAHMIKFRGHFLIEGDLNPDNSDVDKLFI
QLVQTYNQLFEENPINASGVDAKAILSARLSKSRRLENLIAQLPGEKKNGLFGNLIALSLGLTP
NFKSNFDLAEDAKLQLSKDTYDDDLDNLLAQIGDQYADLFLAAKNLSDAILLSDILRVNTEITK
APLSASMIKRYDEHHQDLTLLKALVRQQLPEKYKEIFFDQSKNGYAGYIDGGASQEEFYKFIKP
ILEKMDGTEELLVKLNREDLLRKQRTFDNGSIPHQIHLGELHAILRRQEDFYPFLKDNREKIEK
ILTFRIPYYVGPLARGNSRFAWMTRKSEETITPWNFEEVVDKGASAQSFIERMTNFDKNLPNEK
VLPKHSLLYEYFTVYNELTKVKYVTEGMRKPAFLSGEQKKAIVDLLFKTNRKVTVKQLKEDYFK
KIECFDSVEISGVEDRFNASLGTYHDLLKIIKDKDFLDNEENEDILEDIVLTLTLFEDREMIEE
RLKTYAHLFDDKVMKQLKRRRYTGWGRLSRKLINGIRDKQSGKTILDFLKSDGFANRNFMQLIH
DDSLTFKEDIQKAQVSGQGDSLHEHIANLAGSPAIKKGILQTVKVVDELVKVMGRHKPENIVIE
MARENQTTQKGQKNSRERMKRIEEGIKELGSQILKEHPVENTQLQNEKLYLYYLQNGRDMYVDQ
ELDINRLSDYDVDHIVPQSFLKDDSIDNKVLTRSDKNRGKSDNVPSEEVVKKMKNYWRQLLNAK
LITQRKFDNLTKAERGGLSELDKAGFIKRQLVETRQITKHVAQILDSRMNTKYDENDKLIREVK
VITLKSKLVSDFRKDFQFYKVREINNYHHAHDAYLNAVVGTALIKKYPKLESEFVYGDYKVYDV
RKMIAKSEQEIGKATAKYFFYSNIMNFFKTEITLANGEIRKRPLIETNGETGEIVWDKGRDFAT
VRKVLSMPQVNIVKKTEVQTGGFSKESILPKRNSDKLIARKKDWDPKKYGGFVSPTVAYSVLVV
AKVEKGKSKKLKSVKELLGITIMERSSFEKNPIDFLEAKGYKEVKKDLIIKLPKYSLFELENGR
KRMLASARELQKGNELALPSKYVNFLYLASHYEKLKGSPEDNEQKQLFVEQHKHYLDEIIEQIS
EFSKRVILADANLDKVLSAYNKHRDKPIREQAENIIHLFTLTNLGAPAAFKYFDTTIDRKQYRS
TKEVLDATLIHQSITGLYETRIDLSQLGGDEGADKRTADGSEFESPKKKRKV
10. monoABE8.1_bpNLS + Y147R_Q154R_T166R
(SEQ ID NO: 273)
MSEVEFSHEYWMRHALTLAKRARDEREVPVGAVLVLNNRVIGEGWNRAIGLHDPTAHAEIMALR
QGGLVMQNYRLIDATLYVTFEPCVMCAGAMIHSRIGRVVFGVRNAKTGAAGSLMDVLHYPGMNH
RVEITEGILADECAALLCRFFRMPRRVFNAQKKAQSSRDSGGSSGGSSGSETPGTSESATPESS
GGSSGGSDKKYSIGLAIGTNSVGWAVITDEYKVPSKKFKVLGNTDRHSIKKNLIGALLFDSGET
AEATRLKRTARRRYTRRKNRICYLQEIFSNEMAKVDDSFFHRLEESFLVEEDKKHERHPIFGNI
VDEVAYHEKYPTIYHLRKKLVDSTDKADLRLIYLALAHMIKFRGHFLIEGDLNPDNSDVDKLFI
QLVQTYNQLFEENPINASGVDAKAILSARLSKSRRLENLIAQLPGEKKNGLFGNLIALSLGLTP
NFKSNFDLAEDAKLQLSKDTYDDDLDNLLAQIGDQYADLFLAAKNLSDAILLSDILRVNTEITK
APLSASMIKRYDEHHQDLTLLKALVRQQLPEKYKEIFFDQSKNGYAGYIDGGASQEEFYKFIKP
ILEKMDGTEELLVKLNREDLLRKQRTFDNGSIPHQIHLGELHAILRRQEDFYPFLKDNREKIEK
ILTFRIPYYVGPLARGNSRFAWMTRKSEETITPWNFEEVVDKGASAQSFIERMTNFDKNLPNEK
VLPKHSLLYEYFTVYNELTKVKYVTEGMRKPAFLSGEQKKAIVDLLFKTNRKVTVKQLKEDYFK
KIECFDSVEISGVEDRFNASLGTYHDLLKIIKDKDFLDNEENEDILEDIVLTLTLFEDREMIEE
RLKTYAHLFDDKVMKQLKRRRYTGWGRLSRKLINGIRDKQSGKTILDFLKSDGFANRNFMQLIH
DDSLTFKEDIQKAQVSGQGDSLHEHIANLAGSPAIKKGILQTVKVVDELVKVMGRHKPENIVIE
MARENQTTQKGQKNSRERMKRIEEGIKELGSQILKEHPVENTQLQNEKLYLYYLQNGRDMYVDQ
ELDINRLSDYDVDHIVPQSFLKDDSIDNKVLTRSDKNRGKSDNVPSEEVVKKMKNYWRQLLNAK
LITQRKFDNLTKAERGGLSELDKAGFIKRQLVETRQITKHVAQILDSRMNTKYDENDKLIREVK
VITLKSKLVSDFRKDFQFYKVREINNYHHAHDAYLNAVVGTALIKKYPKLESEFVYGDYKVYDV
RKMIAKSEQEIGKATAKYFFYSNIMNFFKTEITLANGEIRKRPLIETNGETGEIVWDKGRDFAT
VRKVLSMPQVNIVKKTEVQTGGFSKESILPKRNSDKLIARKKDWDPKKYGGFVSPTVAYSVLVV
AKVEKGKSKKLKSVKELLGITIMERSSFEKNPIDFLEAKGYKEVKKDLIIKLPKYSLFELENGR
KRMLASARELQKGNELALPSKYVNFLYLASHYEKLKGSPEDNEQKQLFVEQHKHYLDEIIEQIS
EFSKRVILADANLDKVLSAYNKHRDKPIREQAENIIHLFTLTNLGAPAAFKYFDTTIDRKQYRS
TKEVLDATLIHQSITGLYETRIDLSQLGGDEGADKRTADGSEFESPKKKRKV
11. monoABE8.1_bpNLS + Y147T_Q154R
(SEQ ID NO: 274)
MSEVEFSHEYWMRHALTLAKRARDEREVPVGAVLVLNNRVIGEGWNRAIGLHDPTAHAEIMALR
QGGLVMQNYRLIDATLYVTFEPCVMCAGAMIHSRIGRVVFGVRNAKTGAAGSLMDVLHYPGMNH
RVEITEGILADECAALLCTFFRMPRRVFNAQKKAQSSTDSGGSSGGSSGSETPGTSESATPESS
GGSSGGSDKKYSIGLAIGTNSVGWAVITDEYKVPSKKFKVLGNTDRHSIKKNLIGALLFDSGET
AEATRLKRTARRRYTRRKNRICYLQEIFSNEMAKVDDSFFHRLEESFLVEEDKKHERHPIFGNI
VDEVAYHEKYPTIYHLRKKLVDSTDKADLRLIYLALAHMIKFRGHFLIEGDLNPDNSDVDKLFI
QLVQTYNQLFEENPINASGVDAKAILSARLSKSRRLENLIAQLPGEKKNGLFGNLIALSLGLTP
NFKSNFDLAEDAKLQLSKDTYDDDLDNLLAQIGDQYADLFLAAKNLSDAILLSDILRVNTEITK
APLSASMIKRYDEHHQDLTLLKALVRQQLPEKYKEIFFDQSKNGYAGYIDGGASQEEFYKFIKP
ILEKMDGTEELLVKLNREDLLRKQRTFDNGSIPHQIHLGELHAILRRQEDFYPFLKDNREKIEK
ILTFRIPYYVGPLARGNSRFAWMTRKSEETITPWNFEEVVDKGASAQSFIERMTNFDKNLPNEK
VLPKHSLLYEYFTVYNELTKVKYVTEGMRKPAFLSGEQKKAIVDLLFKTNRKVTVKQLKEDYFK
KIECFDSVEISGVEDRFNASLGTYHDLLKIIKDKDFLDNEENEDILEDIVLTLTLFEDREMIEE
RLKTYAHLFDDKVMKQLKRRRYTGWGRLSRKLINGIRDKQSGKTILDFLKSDGFANRNFMQLIH
DDSLTFKEDIQKAQVSGQGDSLHEHIANLAGSPAIKKGILQTVKVVDELVKVMGRHKPENIVIE
MARENQTTQKGQKNSRERMKRIEEGIKELGSQILKEHPVENTQLQNEKLYLYYLQNGRDMYVDQ
ELDINRLSDYDVDHIVPQSFLKDDSIDNKVLTRSDKNRGKSDNVPSEEVVKKMKNYWRQLLNAK
LITQRKFDNLTKAERGGLSELDKAGFIKRQLVETRQITKHVAQILDSRMNTKYDENDKLIREVK
VITLKSKLVSDFRKDFQFYKVREINNYHHAHDAYLNAVVGTALIKKYPKLESEFVYGDYKVYDV
RKMIAKSEQEIGKATAKYFFYSNIMNFFKTEITLANGEIRKRPLIETNGETGEIVWDKGRDFAT
VRKVLSMPQVNIVKKTEVQTGGFSKESILPKRNSDKLIARKKDWDPKKYGGFVSPTVAYSVLVV
AKVEKGKSKKLKSVKELLGITIMERSSFEKNPIDFLEAKGYKEVKKDLIIKLPKYSLFELENGR
KRMLASARELQKGNELALPSKYVNFLYLASHYEKLKGSPEDNEQKQLFVEQHKHYLDEIIEQIS
EFSKRVILADANLDKVLSAYNKHRDKPIREQAENIIHLFTLTNLGAPAAFKYFDTTIDRKQYRS
TKEVLDATLIHQSITGLYETRIDLSQLGGDEGADKRTADGSEFESPKKKRKV
12. monoABE8.1_bpNLS + Y147T_Q154S
(SEQ ID NO: 275)
MSEVEFSHEYWMRHALTLAKRARDEREVPVGAVLVLNNRVIGEGWNRAIGLHDPTAHAEIMALR
QGGLVMQNYRLIDATLYVTFEPCVMCAGAMIHSRIGRVVFGVRNAKTGAAGSLMDVLHYPGMNH
RVEITEGILADECAALLCTFFRMPRSVFNAQKKAQSSTDSGGSSGGSSGSETPGTSESATPESS
GGSSGGSDKKYSIGLAIGTNSVGWAVITDEYKVPSKKFKVLGNTDRHSIKKNLIGALLFDSGET
AEATRLKRTARRRYTRRKNRICYLQEIFSNEMAKVDDSFFHRLEESFLVEEDKKHERHPIFGNI
VDEVAYHEKYPTIYHLRKKLVDSTDKADLRLIYLALAHMIKFRGHFLIEGDLNPDNSDVDKLFI
QLVQTYNQLFEENPINASGVDAKAILSARLSKSRRLENLIAQLPGEKKNGLFGNLIALSLGLTP
NFKSNFDLAEDAKLQLSKDTYDDDLDNLLAQIGDQYADLFLAAKNLSDAILLSDILRVNTEITK
APLSASMIKRYDEHHQDLTLLKALVRQQLPEKYKEIFFDQSKNGYAGYIDGGASQEEFYKFIKP
ILEKMDGTEELLVKLNREDLLRKQRTFDNGSIPHQIHLGELHAILRRQEDFYPFLKDNREKIEK
ILTFRIPYYVGPLARGNSRFAWMTRKSEETITPWNFEEVVDKGASAQSFIERMTNFDKNLPNEK
VLPKHSLLYEYFTVYNELTKVKYVTEGMRKPAFLSGEQKKAIVDLLFKTNRKVTVKQLKEDYFK
KIECFDSVEISGVEDRFNASLGTYHDLLKIIKDKDFLDNEENEDILEDIVLTLTLFEDREMIEE
RLKTYAHLFDDKVMKQLKRRRYTGWGRLSRKLINGIRDKQSGKTILDFLKSDGFANRNFMQLIH
DDSLTFKEDIQKAQVSGQGDSLHEHIANLAGSPAIKKGILQTVKVVDELVKVMGRHKPENIVIE
MARENQTTQKGQKNSRERMKRIEEGIKELGSQILKEHPVENTQLQNEKLYLYYLQNGRDMYVDQ
ELDINRLSDYDVDHIVPQSFLKDDSIDNKVLTRSDKNRGKSDNVPSEEVVKKMKNYWRQLLNAK
LITQRKFDNLTKAERGGLSELDKAGFIKRQLVETRQITKHVAQILDSRMNTKYDENDKLIREVK
VITLKSKLVSDFRKDFQFYKVREINNYHHAHDAYLNAVVGTALIKKYPKLESEFVYGDYKVYDV
RKMIAKSEQEIGKATAKYFFYSNIMNFFKTEITLANGEIRKRPLIETNGETGEIVWDKGRDFAT
VRKVLSMPQVNIVKKTEVQTGGFSKESILPKRNSDKLIARKKDWDPKKYGGFVSPTVAYSVLVV
AKVEKGKSKKLKSVKELLGITIMERSSFEKNPIDFLEAKGYKEVKKDLIIKLPKYSLFELENGR
KRMLASARELQKGNELALPSKYVNFLYLASHYEKLKGSPEDNEQKQLFVEQHKHYLDEIIEQIS
EFSKRVILADANLDKVLSAYNKHRDKPIREQAENIIHLFTLTNLGAPAAFKYFDTTIDRKQYRS
TKEVLDATLIHQSITGLYETRIDLSQLGGDEGADKRTADGSEFESPKKKRKV
13. monoABE8.1_bpNLS + H123Y123H_Y147R_Q154R_I76Y
(SEQ ID NO: 276)
MSEVEFSHEYWMRHALTLAKRARDEREVPVGAVLVLNNRVIGEGWNRAIGLHDPTAHAEIMALR
QGGLVMQNYRLYDATLYVTFEPCVMCAGAMIHSRIGRVVFGVRNAKTGAAGSLMDVLHHPGMNH
RVEITEGILADECAALLCRFFRMPRRVFNAQKKAQSSTDSGGSSGGSSGSETPGTSESATPESS
GGSSGGSDKKYSIGLAIGTNSVGWAVITDEYKVPSKKFKVLGNTDRHSIKKNLIGALLFDSGET
AEATRLKRTARRRYTRRKNRICYLQEIFSNEMAKVDDSFFHRLEESFLVEEDKKHERHPIFGNI
VDEVAYHEKYPTIYHLRKKLVDSTDKADLRLIYLALAHMIKFRGHFLIEGDLNPDNSDVDKLFI
QLVQTYNQLFEENPINASGVDAKAILSARLSKSRRLENLIAQLPGEKKNGLFGNLIALSLGLTP
NFKSNFDLAEDAKLQLSKDTYDDDLDNLLAQIGDQYADLFLAAKNLSDAILLSDILRVNTEITK
APLSASMIKRYDEHHQDLTLLKALVRQQLPEKYKEIFFDQSKNGYAGYIDGGASQEEFYKFIKP
ILEKMDGTEELLVKLNREDLLRKQRTFDNGSIPHQIHLGELHAILRRQEDFYPFLKDNREKIEK
ILTFRIPYYVGPLARGNSRFAWMTRKSEETITPWNFEEVVDKGASAQSFIERMTNFDKNLPNEK
VLPKHSLLYEYFTVYNELTKVKYVTEGMRKPAFLSGEQKKAIVDLLFKTNRKVTVKQLKEDYFK
KIECFDSVEISGVEDRFNASLGTYHDLLKIIKDKDFLDNEENEDILEDIVLTLTLFEDREMIEE
RLKTYAHLFDDKVMKQLKRRRYTGWGRLSRKLINGIRDKQSGKTILDFLKSDGFANRNFMQLIH
DDSLTFKEDIQKAQVSGQGDSLHEHIANLAGSPAIKKGILQTVKVVDELVKVMGRHKPENIVIE
MARENQTTQKGQKNSRERMKRIEEGIKELGSQILKEHPVENTQLQNEKLYLYYLQNGRDMYVDQ
ELDINRLSDYDVDHIVPQSFLKDDSIDNKVLTRSDKNRGKSDNVPSEEVVKKMKNYWRQLLNAK
LITQRKFDNLTKAERGGLSELDKAGFIKRQLVETRQITKHVAQILDSRMNTKYDENDKLIREVK
VITLKSKLVSDFRKDFQFYKVREINNYHHAHDAYLNAVVGTALIKKYPKLESEFVYGDYKVYDV
RKMIAKSEQEIGKATAKYFFYSNIMNFFKTEITLANGEIRKRPLIETNGETGEIVWDKGRDFAT
VRKVLSMPQVNIVKKTEVQTGGFSKESILPKRNSDKLIARKKDWDPKKYGGFVSPTVAYSVLVV
AKVEKGKSKKLKSVKELLGITIMERSSFEKNPIDELEAKGYKEVKKDLIIKLPKYSLEELENGR
KRMLASARELQKGNELALPSKYVNFLYLASHYEKLKGSPEDNEQKQLFVEQHKHYLDEIIEQIS
EFSKRVILADANLDKVLSAYNKHRDKPIREQAENIIHLFTLTNLGAPAAFKYFDTTIDRKQYRS
TKEVLDATLIHQSITGLYETRIDLSQLGGDEGADKRTADGSEFESPKKKRKV
14. monoABE8.1_bpNLS + V82S + Q154R
(SEQ ID NO: 277)
MSEVEFSHEYWMRHALTLAKRARDEREVPVGAVLVLNNRVIGEGWNRAIGLHDPTAHAEIMALR
QGGLVMQNYRLIDATLYSTFEPCVMCAGAMIHSRIGRVVFGVRNAKTGAAGSLMDVLHYPGMNH
RVEITEGILADECAALLCYFFRMPRRVFNAQKKAQSSTDSGGSSGGSSGSETPGTSESATPESS
GGSSGGSDKKYSIGLAIGTNSVGWAVITDEYKVPSKKFKVLGNTDRHSIKKNLIGALLFDSGET
AEATRLKRTARRRYTRRKNRICYLQEIFSNEMAKVDDSFFHRLEESFLVEEDKKHERHPIFGNI
VDEVAYHEKYPTIYHLRKKLVDSTDKADLRLIYLALAHMIKFRGHFLIEGDLNPDNSDVDKLFI
QLVQTYNQLFEENPINASGVDAKAILSARLSKSRRLENLIAQLPGEKKNGLFGNLIALSLGLTP
NFKSNFDLAEDAKLQLSKDTYDDDLDNLLAQIGDQYADLFLAAKNLSDAILLSDILRVNTEITK
APLSASMIKRYDEHHQDLTLLKALVRQQLPEKYKEIFFDQSKNGYAGYIDGGASQEEFYKFIKP
ILEKMDGTEELLVKLNREDLLRKQRTFDNGSIPHQIHLGELHAILRRQEDFYPFLKDNREKIEK
ILTFRIPYYVGPLARGNSRFAWMTRKSEETITPWNFEEVVDKGASAQSFIERMTNFDKNLPNEK
VLPKHSLLYEYFTVYNELTKVKYVTEGMRKPAFLSGEQKKAIVDLLFKTNRKVTVKQLKEDYFK
KIECFDSVEISGVEDRFNASLGTYHDLLKIIKDKDFLDNEENEDILEDIVLTLTLFEDREMIEE
RLKTYAHLFDDKVMKQLKRRRYTGWGRLSRKLINGIRDKQSGKTILDFLKSDGFANRNFMQLIH
DDSLTFKEDIQKAQVSGQGDSLHEHIANLAGSPAIKKGILQTVKVVDELVKVMGRHKPENIVIE
MARENQTTQKGQKNSRERMKRIEEGIKELGSQILKEHPVENTQLQNEKLYLYYLQNGRDMYVDQ
ELDINRLSDYDVDHIVPQSFLKDDSIDNKVLTRSDKNRGKSDNVPSEEVVKKMKNYWRQLLNAK
LITQRKFDNLTKAERGGLSELDKAGFIKRQLVETRQITKHVAQILDSRMNTKYDENDKLIREVK
VITLKSKLVSDFRKDFQFYKVREINNYHHAHDAYLNAVVGTALIKKYPKLESEFVYGDYKVYDV
RKMIAKSEQEIGKATAKYFFYSNIMNFFKTEITLANGEIRKRPLIETNGETGEIVWDKGRDFAT
VRKVLSMPQVNIVKKTEVQTGGFSKESILPKRNSDKLIARKKDWDPKKYGGFVSPTVAYSVLVV
AKVEKGKSKKLKSVKELLGITIMERSSFEKNPIDFLEAKGYKEVKKDLIIKLPKYSLFELENGR
KRMLASARELQKGNELALPSKYVNFLYLASHYEKLKGSPEDNEQKQLFVEQHKHYLDEIIEQIS
EFSKRVILADANLDKVLSAYNKHRDKPIREQAENIIHLFTLTNLGAPAAFKYFDTTIDRKQYRS
TKEVLDATLIHQSITGLYETRIDLSQLGGDEGADKRTADGSEFESPKKKRKV

### Example 8. Parkinson's Disease

[0994] Materials and Methods

[0995] The results provided in the Examples described herein were obtained using the following materials and methods.

[0996] The sequence of ABEs used in the Examples follows:

01. monoABE8.1_bpNLS + Y147T
(SEQ ID NO: 264)
MSEVEFSHEYWMRHALTLAKRARDEREVPVGAVLVLNNRVIGEGWNRAIGLHDPTAHAEIMALR
QGGLVMQNYRLIDATLYVTFEPCVMCAGAMIHSRIGRVVFGVRNAKTGAAGSLMDVLHYPGMNH
RVEITEGILADECAALLCTFFRMPRQVFNAQKKAQSSTDSGGSSGGSSGSETPGTSESATPESS
GGSSGGSDKKYSIGLAIGTNSVGWAVITDEYKVPSKKFKVLGNTDRHSIKKNLIGALLFDSGET
AEATRLKRTARRRYTRRKNRICYLQEIFSNEMAKVDDSFFHRLEESFLVEEDKKHERHPIFGNI
VDEVAYHEKYPTIYHLRKKLVDSTDKADLRLIYLALAHMIKFRGHFLIEGDLNPDNSDVDKLFI
QLVQTYNQLFEENPINASGVDAKAILSARLSKSRRLENLIAQLPGEKKNGLFGNLIALSLGLTP
NFKSNFDLAEDAKLQLSKDTYDDDLDNLLAQIGDQYADLFLAAKNLSDAILLSDILRVNTEITK
APLSASMIKRYDEHHQDLTLLKALVRQQLPEKYKEIFFDQSKNGYAGYIDGGASQEEFYKFIKP
ILEKMDGTEELLVKLNREDLLRKQRTFDNGSIPHQIHLGELHAILRRQEDFYPFLKDNREKIEK
ILTFRIPYYVGPLARGNSRFAWMTRKSEETITPWNFEEVVDKGASAQSFIERMTNFDKNLPNEK
VLPKHSLLYEYFTVYNELTKVKYVTEGMRKPAFLSGEQKKAIVDLLFKTNRKVTVKQLKEDYFK
KIECFDSVEISGVEDRFNASLGTYHDLLKIIKDKDFLDNEENEDILEDIVLTLTLFEDREMIEE
RLKTYAHLFDDKVMKQLKRRRYTGWGRLSRKLINGIRDKQSGKTILDFLKSDGFANRNFMQLIH
DDSLTFKEDIQKAQVSGQGDSLHEHIANLAGSPAIKKGILQTVKVVDELVKVMGRHKPENIVIE
MARENQTTQKGQKNSRERMKRIEEGIKELGSQILKEHPVENTQLQNEKLYLYYLQNGRDMYVDQ
ELDINRLSDYDVDHIVPQSFLKDDSIDNKVLTRSDKNRGKSDNVPSEEVVKKMKNYWRQLLNAK
LITQRKFDNLTKAERGGLSELDKAGFIKRQLVETRQITKHVAQILDSRMNTKYDENDKLIREVK
VITLKSKLVSDFRKDFQFYKVREINNYHHAHDAYLNAVVGTALIKKYPKLESEFVYGDYKVYDV
RKMIAKSEQEIGKATAKYFFYSNIMNFFKTEITLANGEIRKRPLIETNGETGEIVWDKGRDFAT
VRKVLSMPQVNIVKKTEVQTGGFSKESILPKRNSDKLIARKKDWDPKKYGGFVSPTVAYSVLVV
AKVEKGKSKKLKSVKELLGITIMERSSFEKNPIDFLEAKGYKEVKKDLIIKLPKYSLFELENGR
KRMLASARELQKGNELALPSKYVNFLYLASHYEKLKGSPEDNEQKQLFVEQHKHYLDEIIEQIS
EFSKRVILADANLDKVLSAYNKHRDKPIREQAENIIHLFTLTNLGAPAAFKYFDTTIDRKQYRS
TKEVLDATLIHQSITGLYETRIDLSQLGGDEGADKRTADGSEFESPKKKRKV
02. monoABE8.1_bpNLS + Y147R
(SEQ ID NO: 265)
MSEVEFSHEYWMRHALTLAKRARDEREVPVGAVLVLNNRVIGEGWNRAIGLHDPTAHAEIMALR
QGGLVMQNYRLIDATLYVTFEPCVMCAGAMIHSRIGRVVFGVRNAKTGAAGSLMDVLHYPGMNH
RVEITEGILADECAALLCRFFRMPRQVFNAQKKAQSSTDSGGSSGGSSGSETPGTSESATPESS
GGSSGGSDKKYSIGLAIGTNSVGWAVITDEYKVPSKKFKVLGNTDRHSIKKNLIGALLFDSGET
AEATRLKRTARRRYTRRKNRICYLQEIFSNEMAKVDDSFFHRLEESFLVEEDKKHERHPIFGNI
VDEVAYHEKYPTIYHLRKKLVDSTDKADLRLIYLALAHMIKFRGHFLIEGDLNPDNSDVDKLFI
QLVQTYNQLFEENPINASGVDAKAILSARLSKSRRLENLIAQLPGEKKNGLFGNLIALSLGLTP
NFKSNFDLAEDAKLQLSKDTYDDDLDNLLAQIGDQYADLFLAAKNLSDAILLSDILRVNTEITK
APLSASMIKRYDEHHQDLTLLKALVRQQLPEKYKEIFFDQSKNGYAGYIDGGASQEEFYKFIKP
ILEKMDGTEELLVKLNREDLLRKQRTFDNGSIPHQIHLGELHAILRRQEDFYPFLKDNREKIEK
ILTFRIPYYVGPLARGNSRFAWMTRKSEETITPWNFEEVVDKGASAQSFIERMTNFDKNLPNEK
VLPKHSLLYEYFTVYNELTKVKYVTEGMRKPAFLSGEQKKAIVDLLFKTNRKVTVKQLKEDYFK
KIECFDSVEISGVEDRFNASLGTYHDLLKIIKDKDFLDNEENEDILEDIVLTLTLFEDREMIEE
RLKTYAHLFDDKVMKQLKRRRYTGWGRLSRKLINGIRDKQSGKTILDFLKSDGFANRNFMQLIH
DDSLTFKEDIQKAQVSGQGDSLHEHIANLAGSPAIKKGILQTVKVVDELVKVMGRHKPENIVIE
MARENQTTQKGQKNSRERMKRIEEGIKELGSQILKEHPVENTQLQNEKLYLYYLQNGRDMYVDQ
ELDINRLSDYDVDHIVPQSFLKDDSIDNKVLTRSDKNRGKSDNVPSEEVVKKMKNYWRQLLNAK
LITQRKFDNLTKAERGGLSELDKAGFIKRQLVETRQITKHVAQILDSRMNTKYDENDKLIREVK
VITLKSKLVSDFRKDFQFYKVREINNYHHAHDAYLNAVVGTALIKKYPKLESEFVYGDYKVYDV
RKMIAKSEQEIGKATAKYFFYSNIMNFFKTEITLANGEIRKRPLIETNGETGEIVWDKGRDFAT
VRKVLSMPQVNIVKKTEVQTGGFSKESILPKRNSDKLIARKKDWDPKKYGGFVSPTVAYSVLVV
AKVEKGKSKKLKSVKELLGITIMERSSFEKNPIDFLEAKGYKEVKKDLIIKLPKYSLFELENGR
KRMLASARELQKGNELALPSKYVNFLYLASHYEKLKGSPEDNEQKQLFVEQHKHYLDEIIEQIS
EFSKRVILADANLDKVLSAYNKHRDKPIREQAENIIHLFTLTNLGAPAAFKYFDTTIDRKQYRS
TKEVLDATLIHQSITGLYETRIDLSQLGGDEGADKRTADGSEFESPKKKRKV
03. monoABE8.1_bpNLS + Q154S
(SEQ ID NO: 266)
MSEVEFSHEYWMRHALTLAKRARDEREVPVGAVLVLNNRVIGEGWNRAIGLHDPTAHAEIMALR
QGGLVMQNYRLIDATLYVTFEPCVMCAGAMIHSRIGRVVFGVRNAKTGAAGSLMDVLHYPGMNH
RVEITEGILADECAALLCYFFRMPRSVFNAQKKAQSSTDSGGSSGGSSGSETPGTSESATPESS
GGSSGGSDKKYSIGLAIGTNSVGWAVITDEYKVPSKKFKVLGNTDRHSIKKNLIGALLFDSGET
AEATRLKRTARRRYTRRKNRICYLQEIFSNEMAKVDDSFFHRLEESFLVEEDKKHERHPIFGNI
VDEVAYHEKYPTIYHLRKKLVDSTDKADLRLIYLALAHMIKFRGHFLIEGDLNPDNSDVDKLFI
QLVQTYNQLFEENPINASGVDAKAILSARLSKSRRLENLIAQLPGEKKNGLFGNLIALSLGLTP
NFKSNFDLAEDAKLQLSKDTYDDDLDNLLAQIGDQYADLFLAAKNLSDAILLSDILRVNTEITK
APLSASMIKRYDEHHQDLTLLKALVRQQLPEKYKEIFFDQSKNGYAGYIDGGASQEEFYKFIKP
ILEKMDGTEELLVKLNREDLLRKQRTFDNGSIPHQIHLGELHAILRRQEDFYPFLKDNREKIEK
ILTFRIPYYVGPLARGNSRFAWMTRKSEETITPWNFEEVVDKGASAQSFIERMTNFDKNLPNEK
VLPKHSLLYEYFTVYNELTKVKYVTEGMRKPAFLSGEQKKAIVDLLFKTNRKVTVKQLKEDYFK
KIECFDSVEISGVEDRFNASLGTYHDLLKIIKDKDFLDNEENEDILEDIVLTLTLFEDREMIEE
RLKTYAHLFDDKVMKQLKRRRYTGWGRLSRKLINGIRDKQSGKTILDFLKSDGFANRNFMQLIH
DDSLTFKEDIQKAQVSGQGDSLHEHIANLAGSPAIKKGILQTVKVVDELVKVMGRHKPENIVIE
MARENQTTQKGQKNSRERMKRIEEGIKELGSQILKEHPVENTQLQNEKLYLYYLQNGRDMYVDQ
ELDINRLSDYDVDHIVPQSFLKDDSIDNKVLTRSDKNRGKSDNVPSEEVVKKMKNYWRQLLNAK
LITQRKFDNLTKAERGGLSELDKAGFIKRQLVETRQITKHVAQILDSRMNTKYDENDKLIREVK
VITLKSKLVSDFRKDFQFYKVREINNYHHAHDAYLNAVVGTALIKKYPKLESEFVYGDYKVYDV
RKMIAKSEQEIGKATAKYFFYSNIMNFFKTEITLANGEIRKRPLIETNGETGEIVWDKGRDFAT
VRKVLSMPQVNIVKKTEVQTGGFSKESILPKRNSDKLIARKKDWDPKKYGGFVSPTVAYSVLVV
AKVEKGKSKKLKSVKELLGITIMERSSFEKNPIDFLEAKGYKEVKKDLIIKLPKYSLFELENGR
KRMLASARELQKGNELALPSKYVNFLYLASHYEKLKGSPEDNEQKQLFVEQHKHYLDEIIEQIS
EFSKRVILADANLDKVLSAYNKHRDKPIREQAENIIHLFTLTNLGAPAAFKYFDTTIDRKQYRS
TKEVLDATLIHQSITGLYETRIDLSQLGGDEGADKRTADGSEFESPKKKRKV
04. monoABE8.1_bpNLS + Y123H
(SEQ ID NO: 267)
MSEVEFSHEYWMRHALTLAKRARDEREVPVGAVLVLNNRVIGEGWNRAIGLHDPTAHAEIMALR
QGGLVMQNYRLIDATLYVTFEPCVMCAGAMIHSRIGRVVFGVRNAKTGAAGSLMDVLHHPGMNH
RVEITEGILADECAALLCYFFRMPRQVFNAQKKAQSSTDSGGSSGGSSGSETPGTSESATPESS
GGSSGGSDKKYSIGLAIGTNSVGWAVITDEYKVPSKKFKVLGNTDRHSIKKNLIGALLFDSGET
AEATRLKRTARRRYTRRKNRICYLQEIFSNEMAKVDDSFFHRLEESFLVEEDKKHERHPIFGNI
VDEVAYHEKYPTIYHLRKKLVDSTDKADLRLIYLALAHMIKFRGHFLIEGDLNPDNSDVDKLFI
QLVQTYNQLFEENPINASGVDAKAILSARLSKSRRLENLIAQLPGEKKNGLFGNLIALSLGLTP
NFKSNFDLAEDAKLQLSKDTYDDDLDNLLAQIGDQYADLFLAAKNLSDAILLSDILRVNTEITK
APLSASMIKRYDEHHQDLTLLKALVRQQLPEKYKEIFFDQSKNGYAGYIDGGASQEEFYKFIKP
ILEKMDGTEELLVKLNREDLLRKQRTFDNGSIPHQIHLGELHAILRRQEDFYPFLKDNREKIEK
ILTFRIPYYVGPLARGNSRFAWMTRKSEETITPWNFEEVVDKGASAQSFIERMTNFDKNLPNEK
VLPKHSLLYEYFTVYNELTKVKYVTEGMRKPAFLSGEQKKAIVDLLFKTNRKVTVKQLKEDYFK
KIECFDSVEISGVEDRFNASLGTYHDLLKIIKDKDFLDNEENEDILEDIVLTLTLFEDREMIEE
RLKTYAHLFDDKVMKQLKRRRYTGWGRLSRKLINGIRDKQSGKTILDFLKSDGFANRNFMQLIH
DDSLTFKEDIQKAQVSGQGDSLHEHIANLAGSPAIKKGILQTVKVVDELVKVMGRHKPENIVIE
MARENQTTQKGQKNSRERMKRIEEGIKELGSQILKEHPVENTQLQNEKLYLYYLQNGRDMYVDQ
ELDINRLSDYDVDHIVPQSFLKDDSIDNKVLTRSDKNRGKSDNVPSEEVVKKMKNYWRQLLNAK
LITQRKFDNLTKAERGGLSELDKAGFIKRQLVETRQITKHVAQILDSRMNTKYDENDKLIREVK
VITLKSKLVSDFRKDFQFYKVREINNYHHAHDAYLNAVVGTALIKKYPKLESEEVYGDYKVYDV
RKMIAKSEQEIGKATAKYFFYSNIMNFFKTEITLANGEIRKRPLIETNGETGEIVWDKGRDFAT
VRKVLSMPQVNIVKKTEVQTGGFSKESILPKRNSDKLIARKKDWDPKKYGGFVSPTVAYSVLVV
AKVEKGKSKKLKSVKELLGITIMERSSFEKNPIDFLEAKGYKEVKKDLIIKLPKYSLFELENGR
KRMLASARELQKGNELALPSKYVNFLYLASHYEKLKGSPEDNEQKQLFVEQHKHYLDEIIEQIS
EFSKRVILADANLDKVLSAYNKHRDKPIREQAENIIHLFTLTNLGAPAAFKYFDTTIDRKQYRS
TKEVLDATLIHQSITGLYETRIDLSQLGGDEGADKRTADGSEFESPKKKRKV
05. monoABE8.1_bpNLS + V82S
(SEQ ID NO: 268)
MSEVEFSHEYWMRHALTLAKRARDEREVPVGAVLVLNNRVIGEGWNRAIGLHDPTAHAEIMALR
QGGLVMQNYRLIDATLYSTFEPCVMCAGAMIHSRIGRVVFGVRNAKTGAAGSLMDVLHYPGMNH
RVEITEGILADECAALLCYFFRMPRQVFNAQKKAQSSTDSGGSSGGSSGSETPGTSESATPESS
GGSSGGSDKKYSIGLAIGTNSVGWAVITDEYKVPSKKFKVLGNTDRHSIKKNLIGALLFDSGET
AEATRLKRTARRRYTRRKNRICYLQEIFSNEMAKVDDSFFHRLEESFLVEEDKKHERHPIFGNI
VDEVAYHEKYPTIYHLRKKLVDSTDKADLRLIYLALAHMIKFRGHFLIEGDLNPDNSDVDKLFI
QLVQTYNQLFEENPINASGVDAKAILSARLSKSRRLENLIAQLPGEKKNGLFGNLIALSLGLTP
NFKSNFDLAEDAKLQLSKDTYDDDLDNLLAQIGDQYADLFLAAKNLSDAILLSDILRVNTEITK
APLSASMIKRYDEHHQDLTLLKALVRQQLPEKYKEIFFDQSKNGYAGYIDGGASQEEFYKFIKP
ILEKMDGTEELLVKLNREDLLRKQRTFDNGSIPHQIHLGELHAILRRQEDFYPFLKDNREKIEK
ILTFRIPYYVGPLARGNSRFAWMTRKSEETITPWNFEEVVDKGASAQSFIERMTNFDKNLPNEK
VLPKHSLLYEYFTVYNELTKVKYVTEGMRKPAFLSGEQKKAIVDLLFKTNRKVTVKQLKEDYFK
KIECFDSVEISGVEDRFNASLGTYHDLLKIIKDKDFLDNEENEDILEDIVLTLTLFEDREMIEE
RLKTYAHLFDDKVMKQLKRRRYTGWGRLSRKLINGIRDKQSGKTILDFLKSDGFANRNFMQLIH
DDSLTFKEDIQKAQVSGQGDSLHEHIANLAGSPAIKKGILQTVKVVDELVKVMGRHKPENIVIE
MARENQTTQKGQKNSRERMKRIEEGIKELGSQILKEHPVENTQLQNEKLYLYYLQNGRDMYVDQ
ELDINRLSDYDVDHIVPQSFLKDDSIDNKVLTRSDKNRGKSDNVPSEEVVKKMKNYWRQLLNAK
LITQRKFDNLTKAERGGLSELDKAGFIKRQLVETRQITKHVAQILDSRMNTKYDENDKLIREVK
VITLKSKLVSDFRKDFQFYKVREINNYHHAHDAYLNAVVGTALIKKYPKLESEFVYGDYKVYDV
RKMIAKSEQEIGKATAKYFFYSNIMNFFKTEITLANGEIRKRPLIETNGETGEIVWDKGRDFAT
VRKVLSMPQVNIVKKTEVQTGGFSKESILPKRNSDKLIARKKDWDPKKYGGFVSPTVAYSVLVV
AKVEKGKSKKLKSVKELLGITIMERSSFEKNPIDFLEAKGYKEVKKDLIIKLPKYSLFELENGR
KRMLASARELQKGNELALPSKYVNFLYLASHYEKLKGSPEDNEQKQLFVEQHKHYLDEIIEQIS
EFSKRVILADANLDKVLSAYNKHRDKPIREQAENIIHLFTLTNLGAPAAFKYFDTTIDRKQYRS
TKEVLDATLIHQSITGLYETRIDLSQLGGDEGADKRTADGSEFESPKKKRKV
06. monoABE8.1_bpNLS + T166R
(SEQ ID NO: 269)
MSEVEFSHEYWMRHALTLAKRARDEREVPVGAVLVLNNRVIGEGWNRAIGLHDPTAHAEIMALR
QGGLVMQNYRLIDATLYVTFEPCVMCAGAMIHSRIGRVVFGVRNAKTGAAGSLMDVLHYPGMNH
RVEITEGILADECAALLCYFFRMPRQVFNAQKKAQSSRDSGGSSGGSSGSETPGTSESATPESS
GGSSGGSDKKYSIGLAIGTNSVGWAVITDEYKVPSKKFKVLGNTDRHSIKKNLIGALLFDSGET
AEATRLKRTARRRYTRRKNRICYLQEIFSNEMAKVDDSFFHRLEESFLVEEDKKHERHPIFGNI
VDEVAYHEKYPTIYHLRKKLVDSTDKADLRLIYLALAHMIKFRGHFLIEGDLNPDNSDVDKLFI
QLVQTYNQLFEENPINASGVDAKAILSARLSKSRRLENLIAQLPGEKKNGLFGNLIALSLGLTP
NFKSNFDLAEDAKLQLSKDTYDDDLDNLLAQIGDQYADLFLAAKNLSDAILLSDILRVNTEITK
APLSASMIKRYDEHHQDLTLLKALVRQQLPEKYKEIFFDQSKNGYAGYIDGGASQEEFYKFIKP
ILEKMDGTEELLVKLNREDLLRKQRTFDNGSIPHQIHLGELHAILRRQEDFYPFLKDNREKIEK
ILTFRIPYYVGPLARGNSRFAWMTRKSEETITPWNFEEVVDKGASAQSFIERMTNFDKNLPNEK
VLPKHSLLYEYFTVYNELTKVKYVTEGMRKPAFLSGEQKKAIVDLLFKTNRKVTVKQLKEDYFK
KIECFDSVEISGVEDRFNASLGTYHDLLKIIKDKDFLDNEENEDILEDIVLTLTLFEDREMIEE
RLKTYAHLFDDKVMKQLKRRRYTGWGRLSRKLINGIRDKQSGKTILDFLKSDGFANRNFMQLIH
DDSLTFKEDIQKAQVSGQGDSLHEHIANLAGSPAIKKGILQTVKVVDELVKVMGRHKPENIVIE
MARENQTTQKGQKNSRERMKRIEEGIKELGSQILKEHPVENTQLQNEKLYLYYLQNGRDMYVDQ
ELDINRLSDYDVDHIVPQSFLKDDSIDNKVLTRSDKNRGKSDNVPSEEVVKKMKNYWRQLLNAK
LITQRKFDNLTKAERGGLSELDKAGFIKRQLVETRQITKHVAQILDSRMNTKYDENDKLIREVK
VITLKSKLVSDFRKDFQFYKVREINNYHHAHDAYLNAVVGTALIKKYPKLESEFVYGDYKVYDV
RKMIAKSEQEIGKATAKYFFYSNIMNFFKTEITLANGEIRKRPLIETNGETGEIVWDKGRDFAT
VRKVLSMPQVNIVKKTEVQTGGFSKESILPKRNSDKLIARKKDWDPKKYGGFVSPTVAYSVLVV
AKVEKGKSKKLKSVKELLGITIMERSSFEKNPIDFLEAKGYKEVKKDLIIKLPKYSLFELENGR
KRMLASARELQKGNELALPSKYVNFLYLASHYEKLKGSPEDNEQKQLFVEQHKHYLDEIIEQIS
EFSKRVILADANLDKVLSAYNKHRDKPIREQAENIIHLFTLTNLGAPAAFKYFDTTIDRKQYRS
TKEVLDATLIHQSITGLYETRIDLSQLGGDEGADKRTADGSEFESPKKKRKV
07. monoABE8.1_bpNLS + Q154R
(SEQ ID NO: 270)
MSEVEFSHEYWMRHALTLAKRARDEREVPVGAVLVLNNRVIGEGWNRAIGLHDPTAHAEIMALR
QGGLVMQNYRLIDATLYVTFEPCVMCAGAMIHSRIGRVVFGVRNAKTGAAGSLMDVLHYPGMNH
RVEITEGILADECAALLCYFFRMPRRVFNAQKKAQSSTDSGGSSGGSSGSETPGTSESATPESS
GGSSGGSDKKYSIGLAIGTNSVGWAVITDEYKVPSKKFKVLGNTDRHSIKKNLIGALLFDSGET
AEATRLKRTARRRYTRRKNRICYLQEIFSNEMAKVDDSFFHRLEESFLVEEDKKHERHPIFGNI
VDEVAYHEKYPTIYHLRKKLVDSTDKADLRLIYLALAHMIKFRGHFLIEGDLNPDNSDVDKLFI
QLVQTYNQLFEENPINASGVDAKAILSARLSKSRRLENLIAQLPGEKKNGLFGNLIALSLGLTP
NFKSNFDLAEDAKLQLSKDTYDDDLDNLLAQIGDQYADLFLAAKNLSDAILLSDILRVNTEITK
APLSASMIKRYDEHHQDLTLLKALVRQQLPEKYKEIFFDQSKNGYAGYIDGGASQEEFYKFIKP
ILEKMDGTEELLVKLNREDLLRKQRTFDNGSIPHQIHLGELHAILRRQEDFYPFLKDNREKIEK
ILTFRIPYYVGPLARGNSRFAWMTRKSEETITPWNFEEVVDKGASAQSFIERMTNFDKNLPNEK
VLPKHSLLYEYFTVYNELTKVKYVTEGMRKPAFLSGEQKKAIVDLLFKTNRKVTVKQLKEDYFK
KIECFDSVEISGVEDRFNASLGTYHDLLKIIKDKDFLDNEENEDILEDIVLTLTLFEDREMIEE
RLKTYAHLFDDKVMKQLKRRRYTGWGRLSRKLINGIRDKQSGKTILDFLKSDGFANRNFMQLIH
DDSLTFKEDIQKAQVSGQGDSLHEHIANLAGSPAIKKGILQTVKVVDELVKVMGRHKPENIVIE
MARENQTTQKGQKNSRERMKRIEEGIKELGSQILKEHPVENTQLQNEKLYLYYLQNGRDMYVDQ
ELDINRLSDYDVDHIVPQSFLKDDSIDNKVLTRSDKNRGKSDNVPSEEVVKKMKNYWRQLLNAK
LITQRKFDNLTKAERGGLSELDKAGFIKRQLVETRQITKHVAQILDSRMNTKYDENDKLIREVK
VITLKSKLVSDFRKDFQFYKVREINNYHHAHDAYLNAVVGTALIKKYPKLESEFVYGDYKVYDV
RKMIAKSEQEIGKATAKYFFYSNIMNFFKTEITLANGEIRKRPLIETNGETGEIVWDKGRDFAT
VRKVLSMPQVNIVKKTEVQTGGFSKESILPKRNSDKLIARKKDWDPKKYGGFVSPTVAYSVLVV
AKVEKGKSKKLKSVKELLGITIMERSSFEKNPIDFLEAKGYKEVKKDLIIKLPKYSLFELENGR
KRMLASARELQKGNELALPSKYVNFLYLASHYEKLKGSPEDNEQKQLFVEQHKHYLDEIIEQIS
EFSKRVILADANLDKVLSAYNKHRDKPIREQAENIIHLFTLTNLGAPAAFKYFDTTIDRKQYRS
TKEVLDATLIHQSITGLYETRIDLSQLGGDEGADKRTADGSEFESPKKKRKV
08. monoABE8.1_bpNLS + Y147R_Q154R_Y123H
(SEQ ID NO: 271)
MSEVEFSHEYWMRHALTLAKRARDEREVPVGAVLVLNNRVIGEGWNRAIGLHDPTAHAEIMALR
QGGLVMQNYRLIDATLYVTFEPCVMCAGAMIHSRIGRVVFGVRNAKTGAAGSLMDVLHHPGMNH
RVEITEGILADECAALLCRFFRMPRRVFNAQKKAQSSTDSGGSSGGSSGSETPGTSESATPESS
GGSSGGSDKKYSIGLAIGTNSVGWAVITDEYKVPSKKFKVLGNTDRHSIKKNLIGALLFDSGET
AEATRLKRTARRRYTRRKNRICYLQEIFSNEMAKVDDSFFHRLEESFLVEEDKKHERHPIFGNI
VDEVAYHEKYPTIYHLRKKLVDSTDKADLRLIYLALAHMIKFRGHFLIEGDLNPDNSDVDKLFI
QLVQTYNQLFEENPINASGVDAKAILSARLSKSRRLENLIAQLPGEKKNGLFGNLIALSLGLTP
NFKSNFDLAEDAKLQLSKDTYDDDLDNLLAQIGDQYADLFLAAKNLSDAILLSDILRVNTEITK
APLSASMIKRYDEHHQDLTLLKALVRQQLPEKYKEIFFDQSKNGYAGYIDGGASQEEFYKFIKP
ILEKMDGTEELLVKLNREDLLRKQRTFDNGSIPHQIHLGELHAILRRQEDFYPFLKDNREKIEK
ILTFRIPYYVGPLARGNSRFAWMTRKSEETITPWNFEEVVDKGASAQSFIERMTNFDKNLPNEK
VLPKHSLLYEYFTVYNELTKVKYVTEGMRKPAFLSGEQKKAIVDLLFKTNRKVTVKQLKEDYFK
KIECFDSVEISGVEDRFNASLGTYHDLLKIIKDKDFLDNEENEDILEDIVLTLTLFEDREMIEE
RLKTYAHLFDDKVMKQLKRRRYTGWGRLSRKLINGIRDKQSGKTILDFLKSDGFANRNFMQLIH
DDSLTFKEDIQKAQVSGQGDSLHEHIANLAGSPAIKKGILQTVKVVDELVKVMGRHKPENIVIE
MARENQTTQKGQKNSRERMKRIEEGIKELGSQILKEHPVENTQLQNEKLYLYYLQNGRDMYVDQ
ELDINRLSDYDVDHIVPQSFLKDDSIDNKVLTRSDKNRGKSDNVPSEEVVKKMKNYWRQLLNAK
LITQRKFDNLTKAERGGLSELDKAGFIKRQLVETRQITKHVAQILDSRMNTKYDENDKLIREVK
VITLKSKLVSDFRKDFQFYKVREINNYHHAHDAYLNAVVGTALIKKYPKLESEFVYGDYKVYDV
RKMIAKSEQEIGKATAKYFFYSNIMNFFKTEITLANGEIRKRPLIETNGETGEIVWDKGRDFAT
VRKVLSMPQVNIVKKTEVQTGGFSKESILPKRNSDKLIARKKDWDPKKYGGFVSPTVAYSVLVV
AKVEKGKSKKLKSVKELLGITIMERSSFEKNPIDFLEAKGYKEVKKDLIIKLPKYSLFELENGR
KRMLASARELQKGNELALPSKYVNFLYLASHYEKLKGSPEDNEQKQLFVEQHKHYLDEIIEQIS
EFSKRVILADANLDKVLSAYNKHRDKPIREQAENIIHLFTLTNLGAPAAFKYFDTTIDRKQYRS
TKEVLDATLIHQSITGLYETRIDLSQLGGDEGADKRTADGSEFESPKKKRKV
09. monoABE8.1_bpNLS + Y147R_Q154R_I76Y
(SEQ ID NO: 272)
MSEVEFSHEYWMRHALTLAKRARDEREVPVGAVLVLNNRVIGEGWNRAIGLHDPTAHAEIMALR
QGGLVMQNYRLYDATLYVTFEPCVMCAGAMIHSRIGRVVFGVRNAKTGAAGSLMDVLHYPGMNH
RVEITEGILADECAALLCRFFRMPRRVFNAQKKAQSSTDSGGSSGGSSGSETPGTSESATPESS
GGSSGGSDKKYSIGLAIGTNSVGWAVITDEYKVPSKKFKVLGNTDRHSIKKNLIGALLFDSGET
AEATRLKRTARRRYTRRKNRICYLQEIFSNEMAKVDDSFFHRLEESFLVEEDKKHERHPIFGNI
VDEVAYHEKYPTIYHLRKKLVDSTDKADLRLIYLALAHMIKFRGHFLIEGDLNPDNSDVDKLFI
QLVQTYNQLFEENPINASGVDAKAILSARLSKSRRLENLIAQLPGEKKNGLFGNLIALSLGLTP
NFKSNFDLAEDAKLQLSKDTYDDDLDNLLAQIGDQYADLFLAAKNLSDAILLSDILRVNTEITK
APLSASMIKRYDEHHQDLTLLKALVRQQLPEKYKEIFFDQSKNGYAGYIDGGASQEEFYKFIKP
ILEKMDGTEELLVKLNREDLLRKQRTFDNGSIPHQIHLGELHAILRRQEDFYPFLKDNREKIEK
ILTFRIPYYVGPLARGNSRFAWMTRKSEETITPWNFEEVVDKGASAQSFIERMTNFDKNLPNEK
VLPKHSLLYEYFTVYNELTKVKYVTEGMRKPAFLSGEQKKAIVDLLFKTNRKVTVKQLKEDYFK
KIECFDSVEISGVEDRFNASLGTYHDLLKIIKDKDFLDNEENEDILEDIVLTLTLFEDREMIEE
RLKTYAHLFDDKVMKQLKRRRYTGWGRLSRKLINGIRDKQSGKTILDFLKSDGFANRNFMQLIH
DDSLTFKEDIQKAQVSGQGDSLHEHIANLAGSPAIKKGILQTVKVVDELVKVMGRHKPENIVIE
MARENQTTQKGQKNSRERMKRIEEGIKELGSQILKEHPVENTQLQNEKLYLYYLQNGRDMYVDQ
ELDINRLSDYDVDHIVPQSFLKDDSIDNKVLTRSDKNRGKSDNVPSEEVVKKMKNYWRQLLNAK
LITQRKFDNLTKAERGGLSELDKAGFIKRQLVETRQITKHVAQILDSRMNTKYDENDKLIREVK
VITLKSKLVSDFRKDFQFYKVREINNYHHAHDAYLNAVVGTALIKKYPKLESEFVYGDYKVYDV
RKMIAKSEQEIGKATAKYFFYSNIMNFFKTEITLANGEIRKRPLIETNGETGEIVWDKGRDFAT
VRKVLSMPQVNIVKKTEVQTGGFSKESILPKRNSDKLIARKKDWDPKKYGGFVSPTVAYSVLVV
AKVEKGKSKKLKSVKELLGITIMERSSFEKNPIDFLEAKGYKEVKKDLIIKLPKYSLFELENGR
KRMLASARELQKGNELALPSKYVNFLYLASHYEKLKGSPEDNEQKQLFVEQHKHYLDEIIEQIS
EFSKRVILADANLDKVLSAYNKHRDKPIREQAENIIHLETLTNLGAPAAFKYFDTTIDRKQYRS
TKEVLDATLIHQSITGLYETRIDLSQLGGDEGADKRTADGSEFESPKKKRKV
10. monoABE8.1_bpNLS + Y147R_Q154R_T166R
(SEQ ID NO: 273)
MSEVEFSHEYWMRHALTLAKRARDEREVPVGAVLVLNNRVIGEGWNRAIGLHDPTAHAEIMALR
QGGLVMQNYRLIDATLYVTFEPCVMCAGAMIHSRIGRVVFGVRNAKTGAAGSLMDVLHYPGMNH
RVEITEGILADECAALLCRFFRMPRRVFNAQKKAQSSRDSGGSSGGSSGSETPGTSESATPESS
GGSSGGSDKKYSIGLAIGTNSVGWAVITDEYKVPSKKFKVLGNTDRHSIKKNLIGALLFDSGET
AEATRLKRTARRRYTRRKNRICYLQEIFSNEMAKVDDSFFHRLEESFLVEEDKKHERHPIFGNI
VDEVAYHEKYPTIYHLRKKLVDSTDKADLRLIYLALAHMIKFRGHFLIEGDLNPDNSDVDKLFI
QLVQTYNQLFEENPINASGVDAKAILSARLSKSRRLENLIAQLPGEKKNGLFGNLIALSLGLTP
NFKSNFDLAEDAKLQLSKDTYDDDLDNLLAQIGDQYADLFLAAKNLSDAILLSDILRVNTEITK
APLSASMIKRYDEHHQDLTLLKALVRQQLPEKYKEIFFDQSKNGYAGYIDGGASQEEFYKFIKP
ILEKMDGTEELLVKLNREDLLRKQRTFDNGSIPHQIHLGELHAILRRQEDFYPFLKDNREKIEK
ILTFRIPYYVGPLARGNSRFAWMTRKSEETITPWNFEEVVDKGASAQSFIERMTNFDKNLPNEK
VLPKHSLLYEYFTVYNELTKVKYVTEGMRKPAFLSGEQKKAIVDLLFKTNRKVTVKQLKEDYFK
KIECFDSVEISGVEDRFNASLGTYHDLLKIIKDKDFLDNEENEDILEDIVLTLTLFEDREMIEE
RLKTYAHLFDDKVMKQLKRRRYTGWGRLSRKLINGIRDKQSGKTILDFLKSDGFANRNFMQLIH
DDSLTFKEDIQKAQVSGQGDSLHEHIANLAGSPAIKKGILQTVKVVDELVKVMGRHKPENIVIE
MARENQTTQKGQKNSRERMKRIEEGIKELGSQILKEHPVENTQLQNEKLYLYYLQNGRDMYVDQ
ELDINRLSDYDVDHIVPQSFLKDDSIDNKVLTRSDKNRGKSDNVPSEEVVKKMKNYWRQLLNAK
LITQRKFDNLTKAERGGLSELDKAGFIKRQLVETRQITKHVAQILDSRMNTKYDENDKLIREVK
VITLKSKLVSDFRKDFQFYKVREINNYHHAHDAYLNAVVGTALIKKYPKLESEFVYGDYKVYDV
RKMIAKSEQEIGKATAKYFFYSNIMNFFKTEITLANGEIRKRPLIETNGETGEIVWDKGRDFAT
VRKVLSMPQVNIVKKTEVQTGGFSKESILPKRNSDKLIARKKDWDPKKYGGFVSPTVAYSVLVV
AKVEKGKSKKLKSVKELLGITIMERSSFEKNPIDFLEAKGYKEVKKDLIIKLPKYSLFELENGR
KRMLASARELQKGNELALPSKYVNFLYLASHYEKLKGSPEDNEQKQLFVEQHKHYLDEIIEQIS
EFSKRVILADANLDKVLSAYNKHRDKPIREQAENIIHLFTLTNLGAPAAFKYFDTTIDRKQYRS
TKEVLDATLIHQSITGLYETRIDLSQLGGDEGADKRTADGSEFESPKKKRKV
11. monoABE8.1_bpNLS + Y147T_Q154R
(SEQ ID NO: 274)
MSEVEFSHEYWMRHALTLAKRARDEREVPVGAVLVLNNRVIGEGWNRAIGLHDPTAHAEIMALR
QGGLVMQNYRLIDATLYVTFEPCVMCAGAMIHSRIGRVVFGVRNAKTGAAGSLMDVLHYPGMNH
RVEITEGILADECAALLCTFFRMPRRVFNAQKKAQSSTDSGGSSGGSSGSETPGTSESATPESS
GGSSGGSDKKYSIGLAIGTNSVGWAVITDEYKVPSKKFKVLGNTDRHSIKKNLIGALLFDSGET
AEATRLKRTARRRYTRRKNRICYLQEIFSNEMAKVDDSFFHRLEESELVEEDKKHERHPIFGNI
VDEVAYHEKYPTIYHLRKKLVDSTDKADLRLIYLALAHMIKFRGHFLIEGDLNPDNSDVDKLFI
QLVQTYNQLFEENPINASGVDAKAILSARLSKSRRLENLIAQLPGEKKNGLFGNLIALSLGLTP
NFKSNFDLAEDAKLQLSKDTYDDDLDNLLAQIGDQYADLFLAAKNLSDAILLSDILRVNTEITK
APLSASMIKRYDEHHQDLTLLKALVRQQLPEKYKEIFFDQSKNGYAGYIDGGASQEEFYKFIKP
ILEKMDGTEELLVKLNREDLLRKQRTFDNGSIPHQIHLGELHAILRRQEDFYPFLKDNREKIEK
ILTFRIPYYVGPLARGNSRFAWMTRKSEETITPWNFEEVVDKGASAQSFIERMTNFDKNLPNEK
VLPKHSLLYEYFTVYNELTKVKYVTEGMRKPAFLSGEQKKAIVDLLFKTNRKVTVKQLKEDYFK
KIECFDSVEISGVEDRFNASLGTYHDLLKIIKDKDFLDNEENEDILEDIVLTLTLFEDREMIEE
RLKTYAHLFDDKVMKQLKRRRYTGWGRLSRKLINGIRDKQSGKTILDFLKSDGFANRNFMQLIH
DDSLTFKEDIQKAQVSGQGDSLHEHIANLAGSPAIKKGILQTVKVVDELVKVMGRHKPENIVIE
MARENQTTQKGQKNSRERMKRIEEGIKELGSQILKEHPVENTQLQNEKLYLYYLQNGRDMYVDQ
ELDINRLSDYDVDHIVPQSFLKDDSIDNKVLTRSDKNRGKSDNVPSEEVVKKMKNYWRQLLNAK
LITQRKFDNLTKAERGGLSELDKAGFIKRQLVETRQITKHVAQILDSRMNTKYDENDKLIREVK
VITLKSKLVSDFRKDFQFYKVREINNYHHAHDAYLNAVVGTALIKKYPKLESEFVYGDYKVYDV
RKMIAKSEQEIGKATAKYFFYSNIMNFFKTEITLANGEIRKRPLIETNGETGEIVWDKGRDFAT
VRKVLSMPQVNIVKKTEVQTGGFSKESILPKRNSDKLIARKKDWDPKKYGGFVSPTVAYSVLVV
AKVEKGKSKKLKSVKELLGITIMERSSFEKNPIDFLEAKGYKEVKKDLIIKLPKYSLFELENGR
KRMLASARELQKGNELALPSKYVNFLYLASHYEKLKGSPEDNEQKQLFVEQHKHYLDEIIEQIS
EFSKRVILADANLDKVLSAYNKHRDKPIREQAENIIHLFTLTNLGAPAAFKYFDTTIDRKQYRS
TKEVLDATLIHQSITGLYETRIDLSQLGGDEGADKRTADGSEFESPKKKRKV
12. monoABE8.1_bpNLS + Y147T_Q154S
(SEQ ID NO: 275)
MSEVEFSHEYWMRHALTLAKRARDEREVPVGAVLVLNNRVIGEGWNRAIGLHDPTAHAEIMALR
QGGLVMQNYRLIDATLYVTFEPCVMCAGAMIHSRIGRVVFGVRNAKTGAAGSLMDVLHYPGMNH
RVEITEGILADECAALLCTFFRMPRSVFNAQKKAQSSTDSGGSSGGSSGSETPGTSESATPESS
GGSSGGSDKKYSIGLAIGTNSVGWAVITDEYKVPSKKFKVLGNTDRHSIKKNLIGALLFDSGET
AEATRLKRTARRRYTRRKNRICYLQEIFSNEMAKVDDSFFHRLEESFLVEEDKKHERHPIFGNI
VDEVAYHEKYPTIYHLRKKLVDSTDKADLRLIYLALAHMIKFRGHFLIEGDLNPDNSDVDKLFI
QLVQTYNQLFEENPINASGVDAKAILSARLSKSRRLENLIAQLPGEKKNGLFGNLIALSLGLTP
NFKSNFDLAEDAKLQLSKDTYDDDLDNLLAQIGDQYADLFLAAKNLSDAILLSDILRVNTEITK
APLSASMIKRYDEHHQDLTLLKALVRQQLPEKYKEIFFDQSKNGYAGYIDGGASQEEFYKFIKP
ILEKMDGTEELLVKLNREDLLRKQRTFDNGSIPHQIHLGELHAILRRQEDFYPFLKDNREKIEK
ILTFRIPYYVGPLARGNSRFAWMTRKSEETITPWNFEEVVDKGASAQSFIERMTNFDKNLPNEK
VLPKHSLLYEYFTVYNELTKVKYVTEGMRKPAFLSGEQKKAIVDLLFKTNRKVTVKQLKEDYFK
KIECFDSVEISGVEDRFNASLGTYHDLLKIIKDKDFLDNEENEDILEDIVLTLTLFEDREMIEE
RLKTYAHLFDDKVMKQLKRRRYTGWGRLSRKLINGIRDKQSGKTILDFLKSDGFANRNFMQLIH
DDSLTFKEDIQKAQVSGQGDSLHEHIANLAGSPAIKKGILQTVKVVDELVKVMGRHKPENIVIE
MARENQTTQKGQKNSRERMKRIEEGIKELGSQILKEHPVENTQLQNEKLYLYYLQNGRDMYVDQ
ELDINRLSDYDVDHIVPQSFLKDDSIDNKVLTRSDKNRGKSDNVPSEEVVKKMKNYWRQLLNAK
LITQRKFDNLTKAERGGLSELDKAGFIKRQLVETRQITKHVAQILDSRMNTKYDENDKLIREVK
VITLKSKLVSDFRKDFQFYKVREINNYHHAHDAYLNAVVGTALIKKYPKLESEFVYGDYKVYDV
RKMIAKSEQEIGKATAKYFFYSNIMNFFKTEITLANGEIRKRPLIETNGETGEIVWDKGRDFAT
VRKVLSMPQVNIVKKTEVQTGGFSKESILPKRNSDKLIARKKDWDPKKYGGFVSPTVAYSVLVV
AKVEKGKSKKLKSVKELLGITIMERSSFEKNPIDFLEAKGYKEVKKDLIIKLPKYSLFELENGR
KRMLASARELQKGNELALPSKYVNFLYLASHYEKLKGSPEDNEQKQLFVEQHKHYLDEIIEQIS
EFSKRVILADANLDKVLSAYNKHRDKPIREQAENIIHLFTLTNLGAPAAFKYFDTTIDRKQYRS
TKEVLDATLIHQSITGLYETRIDLSQLGGDEGADKRTADGSEFESPKKKRKV
513. monoABE8.1_bpNLS + H123Y123H_Y147R_Q154R_I76Y
(SEQ ID NO: 276)
MSEVEFSHEYWMRHALTLAKRARDEREVPVGAVLVLNNRVIGEGWNRAIGLHDPTAHAEIMALR
QGGLVMQNYRLYDATLYVTFEPCVMCAGAMIHSRIGRVVFGVRNAKTGAAGSLMDVLHHPGMNH
RVEITEGILADECAALLCRFFRMPRRVFNAQKKAQSSTDSGGSSGGSSGSETPGTSESATPESS
GGSSGGSDKKYSIGLAIGTNSVGWAVITDEYKVPSKKFKVLGNTDRHSIKKNLIGALLFDSGET
AEATRLKRTARRRYTRRKNRICYLQEIFSNEMAKVDDSFFHRLEESFLVEEDKKHERHPIFGNI
VDEVAYHEKYPTIYHLRKKLVDSTDKADLRLIYLALAHMIKFRGHFLIEGDLNPDNSDVDKLFI
QLVQTYNQLFEENPINASGVDAKAILSARLSKSRRLENLIAQLPGEKKNGLFGNLIALSLGLTP
NFKSNFDLAEDAKLQLSKDTYDDDLDNLLAQIGDQYADLFLAAKNLSDAILLSDILRVNTEITK
APLSASMIKRYDEHHQDLTLLKALVRQQLPEKYKEIFFDQSKNGYAGYIDGGASQEEFYKFIKP
ILEKMDGTEELLVKLNREDLLRKQRTFDNGSIPHQIHLGELHAILRRQEDFYPFLKDNREKIEK
ILTFRIPYYVGPLARGNSRFAWMTRKSEETITPWNFEEVVDKGASAQSFIERMTNFDKNLPNEK
VLPKHSLLYEYFTVYNELTKVKYVTEGMRKPAFLSGEQKKAIVDLLFKTNRKVTVKQLKEDYFK
KIECFDSVEISGVEDRFNASLGTYHDLLKIIKDKDFLDNEENEDILEDIVLTLTLFEDREMIEE
RLKTYAHLFDDKVMKQLKRRRYTGWGRLSRKLINGIRDKQSGKTILDFLKSDGFANRNFMQLIH
DDSLTFKEDIQKAQVSGQGDSLHEHIANLAGSPAIKKGILQTVKVVDELVKVMGRHKPENIVIE
MARENQTTQKGQKNSRERMKRIEEGIKELGSQILKEHPVENTQLQNEKLYLYYLQNGRDMYVDQ
ELDINRLSDYDVDHIVPQSFLKDDSIDNKVLTRSDKNRGKSDNVPSEEVVKKMKNYWRQLLNAK
LITQRKFDNLTKAERGGLSELDKAGFIKRQLVETRQITKHVAQILDSRMNTKYDENDKLIREVK
VITLKSKLVSDFRKDFQFYKVREINNYHHAHDAYLNAVVGTALIKKYPKLESEFVYGDYKVYDV
RKMIAKSEQEIGKATAKYFFYSNIMNFFKTEITLANGEIRKRPLIETNGETGEIVWDKGRDFAT
VRKVLSMPQVNIVKKTEVQTGGFSKESILPKRNSDKLIARKKDWDPKKYGGEVSPTVAYSVLVV
AKVEKGKSKKLKSVKELLGITIMERSSFEKNPIDFLEAKGYKEVKKDLIIKLPKYSLFELENGR
KRMLASARELQKGNELALPSKYVNFLYLASHYEKLKGSPEDNEQKQLFVEQHKHYLDEIIEQIS
EFSKRVILADANLDKVLSAYNKHRDKPIREQAENIIHLFTLTNLGAPAAFKYFDTTIDRKQYRS
TKEVLDATLIHQSITGLYETRIDLSQLGGDEGADKRTADGSEFESPKKKRKV
14. monoABE8.1_bpNLS + V82S + Q154R
(SEQ ID NO: 277)
MSEVEFSHEYWMRHALTLAKRARDEREVPVGAVLVLNNRVIGEGWNRAIGLHDPTAHAEIMALR
QGGLVMQNYRLIDATLYSTFEPCVMCAGAMIHSRIGRVVFGVRNAKTGAAGSLMDVLHYPGMNH
RVEITEGILADECAALLCYFFRMPRRVFNAQKKAQSSTDSGGSSGGSSGSETPGTSESATPESS
GGSSGGSDKKYSIGLAIGTNSVGWAVITDEYKVPSKKFKVLGNTDRHSIKKNLIGALLFDSGET
AEATRLKRTARRRYTRRKNRICYLQEIFSNEMAKVDDSFFHRLEESFLVEEDKKHERHPIFGNI
VDEVAYHEKYPTIYHLRKKLVDSTDKADLRLIYLALAHMIKFRGHFLIEGDLNPDNSDVDKLFI
QLVQTYNQLFEENPINASGVDAKAILSARLSKSRRLENLIAQLPGEKKNGLFGNLIALSLGLTP
NFKSNFDLAEDAKLQLSKDTYDDDLDNLLAQIGDQYADLFLAAKNLSDAILLSDILRVNTEITK
APLSASMIKRYDEHHQDLTLLKALVRQQLPEKYKEIFFDQSKNGYAGYIDGGASQEEFYKFIKP
ILEKMDGTEELLVKLNREDLLRKQRTFDNGSIPHQIHLGELHAILRRQEDFYPFLKDNREKIEK
ILTFRIPYYVGPLARGNSRFAWMTRKSEETITPWNFEEVVDKGASAQSFIERMTNFDKNLPNEK
VLPKHSLLYEYFTVYNELTKVKYVTEGMRKPAFLSGEQKKAIVDLLFKTNRKVTVKQLKEDYFK
KIECFDSVEISGVEDRFNASLGTYHDLLKIIKDKDFLDNEENEDILEDIVLTLTLFEDREMIEE
RLKTYAHLFDDKVMKQLKRRRYTGWGRLSRKLINGIRDKQSGKTILDFLKSDGFANRNFMQLIH
DDSLTFKEDIQKAQVSGQGDSLHEHIANLAGSPAIKKGILQTVKVVDELVKVMGRHKPENIVIE
MARENQTTQKGQKNSRERMKRIEEGIKELGSQILKEHPVENTQLQNEKLYLYYLQNGRDMYVDQ
ELDINRLSDYDVDHIVPQSFLKDDSIDNKVLTRSDKNRGKSDNVPSEEVVKKMKNYWRQLLNAK
LITQRKFDNLTKAERGGLSELDKAGFIKRQLVETRQITKHVAQILDSRMNTKYDENDKLIREVK
VITLKSKLVSDFRKDFQFYKVREINNYHHAHDAYLNAVVGTALIKKYPKLESEFVYGDYKVYDV
RKMIAKSEQEIGKATAKYFFYSNIMNFFKTEITLANGEIRKRPLIETNGETGEIVWDKGRDFAT
VRKVLSMPQVNIVKKTEVQTGGFSKESILPKRNSDKLIARKKDWDPKKYGGFVSPTVAYSVLVV
AKVEKGKSKKLKSVKELLGITIMERSSFEKNPIDFLEAKGYKEVKKDLIIKLPKYSLFELENGR
KRMLASARELQKGNELALPSKYVNFLYLASHYEKLKGSPEDNEQKQLFVEQHKHYLDEIIEQIS
EFSKRVILADANLDKVLSAYNKHRDKPIREQAENIIHLFTLTNLGAPAAFKYFDTTIDRKQYRS
TKEVLDATLIHQSITGLYETRIDLSQLGGDEGADKRTADGSEFESPKKKRKV

[0997] A modified SpCas9 including amino acid substitutions D1135M, S1136Q, G1218K, 35 E1219F, A1322R, D1332A, R1335E, and T1337R (MQKFRAER) and having specificity for the altered PAM 5′-NGC-3′ was used for correction of G2019S. A modified SpCas9-VRQR having specificity for altered PAM 5′-NGA-3 was used for correction of R1441C.

[0998] Cloning.

[0999] DNA sequences of target polynucleotides and gRNAs and primers used are described herein. For gRNAs, the following scaffold sequence is presented: GUUUUAGAGC

[1000] UAGAAAUAGC AAGUUAAAAU AAGGCUAGUC CGUUAUCAAC UUGAAAAAGU GGCACCGAGU CGGUGCUUUU (SEQ ID NO: 101). This scaffold was used for the PAMs described in FIGS. 57A-C and FIGS. 58A-C (e.g., NGA and NGC PAMs, respectively). The gRNA encompasses the scaffold sequence and the spacer sequence (target sequence) for an LRRK2 gene comprising a pathogenic mutation as described herein or as determined based on the knowledge of the skilled practitioner and as would be understood to the skilled practitioner in the art. (See, e.g., Komor, A. C., et al., “Programmable editing of a target base in genomic DNA without double-stranded DNA cleavage” Nature 533, 420-424 (2016); Gaudelli, N. M., et al., “Programmable base editing of A•T to G•C in genomic DNA without DNA cleavage” Nature 551, 464-471 (2017); Komor, A. C., et al., “Improved base excision repair inhibition and bacteriophage Mu Gam protein yields C:G-to-T:A base editors with higher efficiency and product purity” Science Advances 3:eaao4774 (2017), and Rees, H. A., et al., “Base editing: precision chemistry on the genome and transcriptome of living cells.” Nat Rev Genet. 2018 December; 19(12):770-788. doi: 10.1038/s41576-018-0059-1).

[1001] PCR was performed using VeraSeq ULtra DNA polymerase (Enzymatics), or Q5 Hot Start High-Fidelity DNA Polymerase (New England Biolabs). Base Editor (BE) plasmids were constructed using USER cloning (New England Biolabs). Deaminase genes were synthesized as gBlocks Gene Fragments (Integrated DNA Technologies). Cas9 genes used are listed below. Cas9 genes were obtained from previously reported plasmids. Deaminase and fusion genes were cloned into pCMV (mammalian codon-optimized) or pET28b (E. coli codon-optimized) backbones. sgRNA expression plasmids were constructed using site-directed mutagenesis.

[1002] Briefly, the primers were 5′ phosphorylated using T4 Polynucleotide Kinase (New England Biolabs) according to the manufacturer's instructions. To amplify regions for Guides 1 and 2, the following primers were used:

Guide 1 Primer
(oAM129; for 5′-AAGCGCAAGCCTGGAGGGAA-3′ (SEQ ID NO: 428)):
(SEQ ID NO: 429)
5′-GAAGCGCAAGCCTGGAGGGAAGTTTTAGAGCTAGAAATAGCA-3′;
Guide 2 Primer
(oAM130; 5′-ACTACAGCATTGCTCAGTAC-3′ (SEQ ID NO: 430)):
(SEQ ID NO: 431)
5′-GACTACAGCATTGCTCAGTACGTTTTAGAGCTAGAAATAGCA-3′;
Shared Primer (oAM95):
(SEQ ID NO: 432)
5′-GGTGTTTCGTCCTTTCCACAAG-3′.

[1003] Next, PCR was performed using Q5 Hot Start High-Fidelity Polymerase (New England Biolabs) with the phosphorylated primers and the plasmid encoding a gene of interest as a template according to the manufacturer's instructions. PCR products were incubated with Dpnl (20 U, New England Biolabs) at 37° C. for 1 hour, purified on a QlAprep spin column (Qiagen), and ligated using QuickLigase (New England Biolabs) according to the manufacturer's instructions. DNA vector amplification was carried out using Machl competent cells (ThermoFisher Scientific).

[1004] In Vitro Deaminase Assay on ssDNA.

[1005] Sequences of all ssDNA substrates are provided below. All Cy3-labelled substrates were obtained from Integrated DNA Technologies (IDT). Deaminases were expressed in vitro using the TNT T7 Quick Coupled Transcription/Translation Kit (Promega) according to the manufacturer's instructions using 1 μg of plasmid. Following protein expression, 5 μl of lysate was combined with 35 μl of ssDNA (1.8 μM) and USER enzyme (1 unit) in CutSmart buffer (New England Biolabs) (50 mM potassium acetate, 29 mM Tris-acetate, 10 mM magnesium acetate, 100 μg ml-1 BSA, pH 7.9) and incubated at 37° C. for 2 h. Cleaved U-containing substrates were resolved from full-length unmodified substrates on a 10% TBE-urea gel (Bio-Rad).

[1006] Expression and Purification of His6-ABE8/PV1-28-Linker-dCas9 Fusions.

[1007] E. coli BL21 STAR (DE3)-competent cells (ThermoFisher Scientific) were transformed with plasmids (e.g. plasmids encoding pET28b-His6-ABE8/PV1-28-linker-dCas9). The resulting expression strains were grown overnight in Luria-Bertani (LB) broth containing 100 μg ml-1 of kanamycin at 37° C. The cells were diluted 1:100 into the same growth medium and grown at 37° C. to OD600=—0.6. The culture was cooled to 4° C. over a period of 2 h, and isopropyl-β-d-1-thiogalactopyranoside (IPTG) was added at 0.5 mM to induce protein expression. After ˜16 h, the cells were collected by centrifugation at 4,000g and were resuspended in lysis buffer (50 mM tris(hydroxymethyl)-aminomethane (Tris)-HCl (pH 7.5), 1 M NaCl, 20% glycerol, 10 mM tris(2-carboxyethyl)phosphine (TCEP, Soltec Ventures)). The cells were lysed by sonication (20 s pulse-on, 20 s pulse-off for 8 min total at 6 W output) and the lysate supernatant was isolated following centrifugation at 25,000g for 15 minutes. The lysate was incubated with His-Pur nickel-nitriloacetic acid (nickel-NTA) resin (ThermoFisher Scientific) at 4° C. for 1 hour to capture the His-tagged fusion protein. The resin was transferred to a column and washed with 40 ml of lysis buffer. The His-tagged fusion protein was eluted in lysis buffer supplemented with 285 mM imidazole, and concentrated by ultrafiltration (Amicon-Millipore, 100-kDa molecular weight cut-off) to 1 ml total volume. The protein was diluted to 20 ml in low-salt purification buffer containing 50 mM tris(hydroxymethyl)-aminomethane (Tris)-HCl (pH 7.0), 0.1 M NaCl, 20% glycerol, 10 mM TCEP and loaded onto SP Sepharose Fast Flow resin (GE Life Sciences). The resin was washed with 40 ml of this low-salt buffer, and the protein eluted with 5 ml of activity buffer containing 50 mM tris(hydroxymethyl)-aminomethane (Tris)-HCl (pH 7.0), 0.5 M NaCl, 20% glycerol, 10 mM TCEP. The eluted proteins were quantified by SDS—PAGE.

[1008] In Vitro Transcription of sgRNAs.

[1009] Linear DNA fragments containing the T7 promoter followed by the 20-bp sgRNA target sequence were transcribed in vitro using the TranscriptAid T7 High Yield Transcription Kit (ThermoFisher Scientific) according to the manufacturer's instructions. sgRNA products were purified using the MEGAclear Kit (ThermoFisher Scientific) according to the manufacturer's instructions and quantified by UV absorbance.

[1010] Preparation of Cy3-Conjugated dsDNA Substrates.

[1011] Typically, unlabled sequence strands (e.g. sequences of 80-nt unlabelled strands) were ordered as PAGE-purified oligonucleotides from IDT. A 25-nt Cy3-labelled primer complementary to the 3′ end of each 80-nt substrate was ordered as an HPLC-purified oligonucleotide from IDT. To generate the Cy3-labelled dsDNA substrates, the 80-nt strands (5 μl of a 100 μM solution) were combined with the Cy3-labelled primer (5 μl of a 100 μM solution) in NEBuffer 2 (38.25 μl of a 50 mM NaCl, 10 mM Tris-HCl, 10 mM MgCl2, 1 mM DTT, pH 7.9 solution, New England Biolabs) with dNTPs (0.75 μl of a 100 mM solution) and heated to 95° C. for 5 min, followed by a gradual cooling to 45° C. at a rate of 0.1° C. per s. After this annealing period, Klenow exo- (5 U, New England Biolabs) was added and the reaction was incubated at 37° C. for 1 h. The solution was diluted with buffer PB (250 μl, Qiagen) and isopropanol (50 μl) and purified on a QIAprep spin column (Qiagen), eluting with 50 μl of Tris buffer. Deaminase assay on dsDNA. The purified fusion protein (20 μl of 1.9 μM in activity buffer) was combined with 1 equivalent of appropriate sgRNA and incubated at ambient temperature for 5 min. The Cy3-labelled dsDNA substrate was added to final concentration of 125 nM and the resulting solution was incubated at 37° C. for 2 h. The dsDNA was separated from the fusion by the addition of buffer PB (100 Qiagen) and isopropanol (25 μl) and purified on an EconoSpin micro spin column (Epoch Life Science), eluting with 20 μl of CutSmart buffer (New England Biolabs). USER enzyme (1 U, New England Biolabs) was added to the purified, edited dsDNA and incubated at 37° C. for 1 h. The Cy3-labeled strand was fully denatured from its complement by combining 5 μl of the reaction solution with 15 μl of a DMSO-based loading buffer (5 mM Tris, 0.5 mM EDTA, 12.5% glycerol, 0.02% bromophenol blue, 0.02% xylene cyan, 80% DMSO). The full-length C-containing substrate was separated from any cleaved, U-containing edited substrates on a 10% TBE-urea gel (Bio-Rad) and imaged on a GE Amersham Typhoon imager.

[1012] Preparation of In Vitro-Edited dsDNA for High-Throughput Sequencing.

[1013] Oligonucleotides were obtained from IDT. Complementary sequences were combined (5 μl of a 100 μM solution) in Tris buffer and annealed by heating to 95° C. for 5 min, followed by a gradual cooling to 45° C. at a rate of 0.1° C. per s to generate 60-bp dsDNA substrates. Purified fusion protein (20 μl of 1.9 μM in activity buffer) was combined with 1 equivalent of appropriate sgRNA and incubated at ambient temperature for 5 min. The 60-mer dsDNA substrate was added to final concentration of 125 nM, and the resulting solution was incubated at 37° C. for 2 h. The dsDNA was separated from the fusion by the addition of buffer PB (100 μl, Qiagen) and isopropanol (25 μl) and purified on a EconoSpin micro spin column (Epoch Life Science), eluting with 20 μl of Tris buffer. The resulting edited DNA (1 μl was used as a template) was amplified by PCR using high-throughput sequencing primer pairs and VeraSeq Ultra (Enzymatics) according to the manufacturer's instructions with 13 cycles of amplification. PCR reaction products were purified using RapidTips (Diffinity Genomics), and the purified DNA was amplified by PCR with primers containing sequencing adapters, purified, and sequenced on a MiSeq high-throughput DNA sequencer (Illumina) as previously described.

[1014] Cell Culture.

[1015] HEK293T (ATCC CRL-3216) and U2OS (ATCC HTB-96) were maintained in Dulbecco's Modified Eagle's Medium plus GlutaMax (ThermoFisher) supplemented with 10% (v/v) fetal bovine serum (FBS), at 37° C. with 5% CO2. HCC1954 cells (ATCC CRL-2338) were maintained in RPMI-1640 medium (ThermoFisher Scientific) supplemented as described above. Immortalized cells containing LRRK2) (Taconic Biosciences) were cultured in Dulbecco's Modified Eagle's Medium plus GlutaMax (ThermoFisher Scientific) supplemented with 10% (v/v) fetal bovine serum (FBS) and 200 μg ml-1 Geneticin (ThermoFisher Scientific).

[1016] Transfections.

[1017] HEK293T cells were seeded on 48-well collagen-coated BioCoat plates (Corning) and transfected at approximately 85% confluency. Briefly, 750 ng of BE and 250 ng of sgRNA expression plasmids were transfected using 1.5 μl of Lipofectamine 2000 (ThermoFisher Scientific) per well according to the manufacturer's protocol. HEK293T cells were transfected using appropriate Amaxa Nucleofector II programs according to manufacturer's instructions (V kits using program Q-001 for HEK293T cells).

[1018] High-Throughput DNA Sequencing of Genomic DNA Samples.

[1019] Transfected cells were harvested after 3 days and the genomic DNA was isolated using the Agencourt DNAdvance Genomic DNA Isolation Kit (Beckman Coulter) according to the manufacturer's instructions. On-target and off-target genomic regions of interest were amplified by PCR with flanking high-throughput sequencing primer pair. PCR amplification was carried out with Phusion high-fidelity DNA polymerase (ThermoFisher) according to the manufacturer's instructions using 5 ng of genomic DNA as a template. Cycle numbers were determined separately for each primer pair as to ensure the reaction was stopped in the linear range of amplification. PCR products were purified using RapidTips (Diffinity Genomics). Purified DNA was amplified by PCR with primers containing sequencing adaptors. The products were gel purified and quantified using the Quant-iT PicoGreen dsDNA Assay Kit (ThermoFisher) and KAPA Library Quantification Kit-Illumina (KAPA Biosystems). Samples were sequenced on an Illumina MiSeq as previously described (Pattanayak, Nature Biotechnol. 31, 839-843 (2013)).

[1020] Data Analysis.

[1021] Sequencing reads were automatically demultiplexed using MiSeq Reporter (Illumina), and individual FASTQ files were analysed with a custom Matlab. Each read was pairwise aligned to the appropriate reference sequence using the Smith-Waterman algorithm. Base calls with a Q-score below 31 were replaced with Ns and were thus excluded in calculating nucleotide frequencies. This treatment yields an expected MiSeq base-calling error rate of approximately 1 in 1,000. Aligned sequences in which the read and reference sequence contained no gaps were stored in an alignment table from which base frequencies could be tabulated for each locus. Indel frequencies were quantified with a custom Matlab script using previously described criteria (Zuris, et al., Nature Biotechnol. 33, 73-80 (2015). Sequencing reads were scanned for exact matches to two 10-bp sequences that flank both sides of a window in which indels might occur. If no exact matches were located, the read was excluded from analysis. If the length of this indel window exactly matched the reference sequence the read was classified as not containing an indel. If the indel window was two or more bases longer or shorter than the reference sequence, then the sequencing read was classified as an insertion or deletion, respectively.

### PAM Variant Validation in Base Editors

[1022] Novel CRISPR systems and PAM variants enable base editors (e.g., PV1-PV28) to make precise corrections at a target SNP present in an LRRK2 polynucleotide. Several novel PAM variants have been evaluated and validated. Details of PAM evaluations and base editors are described, for example, in International PCT Application Nos. PCT/2017/045381 (WO2018/027078); PCT/US2016/058344 (WO2017/070632); Kleinstiver, B. P., et al., “Engineered CRISPR-Cas9 nucleases with altered PAM specificities” Nature 523, 481-485 (2015); and Kleinstiver, B. P., et al., “Broadening the targeting range of Staphylococcus aureus CRISPR-Cas9 by modifying PAM recognition” Nature Biotechnology 33, 1293-1298 (2015), each of which is incorporated herein by reference in its entirety. Also see Komor, A. C., et al., “Programmable editing of a target base in genomic DNA without double-stranded DNA cleavage” Nature 533, 420-424 (2016); Gaudelli, N. M., et al., “Programmable base editing of A•T to G•C in genomic DNA without DNA cleavage” Nature 551, 464-471 (2017); and Komor, A C., et al., “Improved base excision repair inhibition and bacteriophage Mu Gam protein yields C:G-to-T:A base editors with higher efficiency and product purity” Science Advances 3:eaao4774 (2017), the entire contents of each of which are hereby incorporated by reference.

### Gene Editing to Correct Parkinson's Disease Mutations

[1023] Pathogenic mutations R1441C and R1441H in LRRK2 are associated with Parkinson's Disease. As shown in FIG. 55, the R1441C mutation, which is associated with a G>A mutation in the antisense strand of the LRRK2 gene, which is corrected using a base editor having adenosine deaminase activity and AGA PAM specificity. The R1441H in LRRK, which is encoded by a G>A mutation in the LRRK2 gene, is corrected using a base editor having adenosine deaminase activity and TGA PAM specificity at position 3 or having TGT specificity at position 5 of the target sequence shown at FIG. 55.

[1024] FIG. 56 is a schematic diagram showing target sequences for correction of the Y1699C, G2019S, and I2020T mutations in LRRK2 associated with Parkinson's Disease. The Y1699C mutation is associated with a T>C mutation on the antisense strand of the LRRK2 gene, which is corrected using a base editor having cytidine deaminase activity. The G2019S mutation is associated with a G>A mutation on the antisense strand of the LRRK2 gene, which is corrected using a base editor having adenosine deaminase activity. I2020T is encoded by a T>C mutation in the LRRK2 gene, which is corrected using a base editor having cytidine deaminase activity and TGC PAM specificity.

[1025] As shown in FIG. 57A-57C, Editors PV 1-14 were used to edit LRRK2 R1441C using a guide RNA having the sequence shown in FIG. 57B, but where all thymidines (Ts) in the target sequence are substituted by uridines (Us) (guide RNA1: 5′-AAGCGCAAGCCUGGAGGGAA-3′ (SEQ ID NO: 11)). The percent conversion of A to G is shown at FIG. 57A. An exemplary sequence read is shown at FIG. 57C.

[1026] As shown in FIG. 58A-58C, Editors PV 15-28 were used to edit LRRK2 G2019S using a guide RNA having the sequence shown in FIG. 58B, but where all thymidines (Ts) in the target sequence are substituted by uridines (Us) (guide RNA2: 5′-ACUACAGCAUUGCUCAGUAC-3′ (SEQ ID NO: 12)). The percent conversion of A to G at target and off-target sites is shown at FIG. 58A. An exemplary sequence read is shown at FIG. 58C. Editors (PV15-28) were used to edit G2019S.

[1027] A description of the editors (PV15-28) used for correction of the LRRK2 mutations follows:

PV1 (also PV15). pCMV_monoABE8.1_bpNLS + Y147T
(SEQ ID NO: 21)
MSEVEFSHEYWMRHALTLAKRARDEREVPVGAVLVLNNRVIGEGWNRAIGLHDPTAHAEIMALR
QGGLVMQNYRLIDATLYVTFEPCVMCAGAMIHSRIGRVVFGVRNAKTGAAGSLMDVLHYPGMNH
RVEITEGILADECAALLCTFFRMPRQVFNAQKKAQSSTD
PV2 (also PV16). pCMV_monoABE8.1_bpNLS + Y147R
(SEQ ID NO: 88)
MSEVEFSHEYWMRHALTLAKRARDEREVPVGAVLVLNNRVIGEGWNRAIGLHDPTAHAEIMALR
QGGLVMQNYRLIDATLYVTFEPCVMCAGAMIHSRIGRVVFGVRNAKTGAAGSLMDVLHYPGMNH
RVEITEGILADECAALLCRFFRMPRQVFNAQKKAQSSTD
PV3 (also PV17). pCMV_monoABE8.1_bpNLS + Q154S
(SEQ ID NO: 89)
MSEVEFSHEYWMRHALTLAKRARDEREVPVGAVLVLNNRVIGEGWNRAIGLHDPTAHAEIMALR
QGGLVMQNYRLIDATLYVTFEPCVMCAGAMIHSRIGRVVFGVRNAKTGAAGSLMDVLHYPGMNH
RVEITEGILADECAALLCYFFRMPRSVFNAQKKAQSSTD
PV4 (also PV18). pCMV_monoABE8.1_bpNLS + Y123H
(SEQ ID NO: 90)
MSEVEFSHEYWMRHALTLAKRARDEREVPVGAVLVLNNRVIGEGWNRAIGLHDPTAHAEIMALR
QGGLVMQNYRLIDATLYVTFEPCVMCAGAMIHSRIGRVVFGVRNAKTGAAGSLMDVLHHPGMNH
RVEITEGILADECAALLCYFFRMPRQVFNAQKKAQSSTD
PV5 (also PV19). pCMV_monoABE8.1_bpNLS + V82S
(SEQ ID NO: 91)
MSEVEFSHEYWMRHALTLAKRARDEREVPVGAVLVLNNRVIGEGWNRAIGLHDPTAHAEIMALR
QGGLVMQNYRLIDATLYSTFEPCVMCAGAMIHSRIGRVVFGVRNAKTGAAGSLMDVLHYPGMNH
RVEITEGILADECAALLCYFFRMPRQVFNAQKKAQSSTD
PV6 (also PV20). pCMV_monoABE8.1_bpNLS + T166R
(SEQ ID NO: 92)
MSEVEFSHEYWMRHALTLAKRARDEREVPVGAVLVLNNRVIGEGWNRAIGLHDPTAHAEIMALR
QGGLVMQNYRLIDATLYVTFEPCVMCAGAMIHSRIGRVVFGVRNAKTGAAGSLMDVLHYPGMNH
RVEITEGILADECAALLCYFFRMPRQVFNAQKKAQSSRD
PV7 (also PV21). pCMV_monoABE8.1_bpNLS + Q154R
(SEQ ID NO: 93)
MSEVEFSHEYWMRHALTLAKRARDEREVPVGAVLVLNNRVIGEGWNRAIGLHDPTAHAEIMALR
QGGLVMQNYRLIDATLYVTFEPCVMCAGAMIHSRIGRVVFGVRNAKTGAAGSLMDVLHYPGMNH
RVEITEGILADECAALLCYFFRMPRRVFNAQKKAQSSTD
PV8 (also PV22). pCMV_monoABE8.1_bpNLS + Y147R_Q154R_Y123H
(SEQ ID NO: 94)
MSEVEFSHEYWMRHALTLAKRARDEREVPVGAVLVLNNRVIGEGWNRAIGLHDPTAHAEIMALR
QGGLVMQNYRLIDATLYVTFEPCVMCAGAMIHSRIGRVVFGVRNAKTGAAGSLMDVLHHPGMNH
RVEITEGILADECAALLCRFFRMPRRVFNAQKKAQSSTD
PV9 (also PV23). pCMV_monoABE8.1_bpNLS + Y147R_Q154R_I76Y
(SEQ ID NO: 95)
MSEVEFSHEYWMRHALTLAKRARDEREVPVGAVLVLNNRVIGEGWNRAIGLHDPTAHAEIMALR
QGGLVMQNYRLYDATLYVTFEPCVMCAGAMIHSRIGRVVFGVRNAKTGAAGSLMDVLHYPGMNH
RVEITEGILADECAALLCRFFRMPRRVFNAQKKAQSSTD
PV10 (also PV24). pCMV_monoABE8.1_bpNLS + Y147R_Q154R_T166R
(SEQ ID NO: 96)
MSEVEFSHEYWMRHALTLAKRARDEREVPVGAVLVLNNRVIGEGWNRAIGLHDPTAHAEIMALR
QGGLVMQNYRLIDATLYVTFEPCVMCAGAMIHSRIGRVVFGVRNAKTGAAGSLMDVLHYPGMNH
RVEITEGILADECAALLCRFFRMPRRVFNAQKKAQSSRD
PV11 (also PV25). pCMV_monoABE8.1_bpNLS + Y147T_Q154R
(SEQ ID NO: 97)
MSEVEFSHEYWMRHALTLAKRARDEREVPVGAVLVLNNRVIGEGWNRAIGLHDPTAHAEIMALR
QGGLVMQNYRLIDATLYVTFEPCVMCAGAMIHSRIGRVVFGVRNAKTGAAGSLMDVLHYPGMNH
RVEITEGILADECAALLCTFFRMPRRVFNAQKKAQSSTD
PV12 (also PV26). pCMV_monoABE8.1_bpNLS + Y147T_Q154S
(SEQ ID NO: 98)
MSEVEFSHEYWMRHALTLAKRARDEREVPVGAVLVLNNRVIGEGWNRAIGLHDPTAHAEIMALR
QGGLVMQNYRLIDATLYVTFEPCVMCAGAMIHSRIGRVVFGVRNAKTGAAGSLMDVLHYPGMNH
RVEITEGILADECAALLCTFFRMPRSVFNAQKKAQSSTD
PV13 (also PV27). pCMV_monoABE8.1_bpNLS + H123Y123H_Y147R_Q154R_I76Y
(SEQ ID NO: 99)
MSEVEFSHEYWMRHALTLAKRARDEREVPVGAVLVLNNRVIGEGWNRAIGLHDPTAHAEIMALR
QGGLVMQNYRLYDATLYVTFEPCVMCAGAMIHSRIGRVVFGVRNAKTGAAGSLMDVLHHPGMNH
RVEITEGILADECAALLCRFFRMPRRVFNAQKKAQSSTD
PV14 (also PV28). pCMV_monoABE8.1_bpNLS + V82S + Q154R
(SEQ ID NO: 100)
MSEVEFSHEYWMRHALTLAKRARDEREVPVGAVLVLNNRVIGEGWNRAIGLHDPTAHAEIMALR
QGGLVMQNYRLIDATLYSTFEPCVMCAGAMIHSRIGRVVFGVRNAKTGAAGSLMDVLHYPGMNH
RVEITEGILADECAALLCYFFRMPRRVFNAQKKAQSSTD

[1028] FIGS. 59A-59L provides exemplary sequence reads for the A to G transition at position 7 of the LRRK2 target sequence, which encodes R1441C. The editor is indicated (PV1-14).

[1029] FIGS. 60A-60W depicts the sequence reads for the A to G transition at positions 4 and 6 of the LRRK2 target sequence, which encodes G2019S. The editor is indicated (PV15-28). Other pathogenic mutations in LRRK2 associated with Parkinson Disease are corrected using similar strategies (FIG. 61A-61D).

### Example 9. Hitler Syndrome Base Editing for the Correction of the W401X Mutation in the Mouse Alpha-L-Iduronidase (IDUA) Gene

[1030] Hurler Syndrome is the most severe form of mucopolysaccharidosis type 1 (MPS1). MPS1 is caused by mutations in alpha-L-iduronidase (IDUA) gene. Currently, there are no transgenic mouse models containing the human IDUA gene. However, there is high conservation between the Mus musculus IDUA protein amino acid sequence and the Homo sapiens IDUA protein amino acid sequence. In humans, a common mutation for MPS1 associated with a severe Hurler Syndrome phenotype is W402X. This mutation is a single base substitution that introduces a stop codon at position 402 (W402X) of the IDUA protein and is associated with an extremely severe clinical phenotype in homozygotes. In mice, the equivalent mutation in the IDUA protein is W401X. ABEs may be used for the correction of the Mus musculus IDUA gene by correcting the W401X mutation by efficiently converting A>G at a targeted site. An A>G correction at the SNP changes the stop codon at position 401 (W401X) to tryptophan in the IDUA polypeptide.

[1031] The W401X mutation was targeted for reversion to wild-type sequence using A•T to G•C DNA base editors (ABEs) that employ Cas9 moieties with validated protospacer adjacent motif (PAM) sequence preferences. To determine which guide RNA (gRNA) and ABE8-Cas9 platform is able to most efficiently and precisely correct a targeted IDUA mutation, a Mus musculus IDUA allele bearing the Hurler Syndrome W401X targetable mutation was genomically integrated in HEK293T cells by lentivirus transduction. The HEK293T cells were transfected and plated at 30,000 cells per well of a 48-well plate with 250 ng of gRNA and 750 ng of ABE8 variant base editor expression plasmid using Opti-MEM media and Lipofectamine 2000 as described above. The ABE8 base editor variants contained the NGG PAM sequence (i.e., SpCas9). The cells were lysed and prepped for sequencing 5 days post-transfection (with a media change at day 3 post-transfection) and analyzed for base editing at the desired site by miSeq analysis.

[1032] The DNA targeted/insert sequence for Mus musculus IDUA is shown below and corresponds to nucleic acids 1077-1358 of the representative Mus musculus IDUA gene sequence found under NCBI Reference Sequence No. NM_008325.4.

(SEQ ID NO: 433)
CTCCCAGCGCACACTTACTGCTCGATTCCAGGTCAACAATACTCACCCA
CCCCACGTGCAGTTGCTGCGAAAGCCAGTACTCACAGTCATGGGGCTCA
TGGCCCTGTTGGATGGAGAACAACTCTAGGCAGAGGTCTCAAAGGCTGG
GGCTGTGTTGGACAGCAATCATACAGTGGGTGTCCTGGCCAGCACCCAT
CACCCTGAAGGCTCCGCAGCGGCCTGGAGTACCACAGTCCTCATCTACA
CTAGTGATGACACCCACGCACACCCCAACCACAGTAT

[1033] The above Mus musculus DNA target/insert sequence for the W401X mutation contains an “A” nucleobase (shown in bold and underlined), while the Mus musculus IDUA gene sequence contains a “G” nucleobase at position 1202.

[1034] Two guide RNAs were tested for base editing of the Mus musculus IDUA W401X mutation. The gRNA encompasses the scaffold sequence and the spacer sequence (target sequence) for disease-associated genes as provided herein or as determined based on the knowledge of the skilled practitioner and as would be understood to the skilled practitioner in the art. (See, e.g., Komor, A. C., et al., “Programmable editing of a target base in genomic DNA without double-stranded DNA cleavage” Nature 533, 420-424 (2016); Gaudelli, N. M., et al., “Programmable base editing of A•T to G•C in genomic DNA without DNA cleavage” Nature 551, 464-471 (2017); Komor, A. C., et al., “Improved base excision repair inhibition and bacteriophage Mu Gam protein yields C:G-to-T:A base editors with higher efficiency and product purity” Science Advances 3:eaao4774 (2017), and Rees, H. A., et al., “Base editing: precision chemistry on the genome and transcriptome of living cells.” Nat Rev Genet. 2018 December; 19(12):770-788. doi: 10.1038/s41576-018-0059-1).

[1035] A 21-nucleotide guide RNA (gRNA) was tested targeting the IDUA W401X mutation with ABE8 base editor variants (FIGS. 62A and 62B). The 21-nucleotide gRNA sequence, which hybridizes to the complement of the above DNA target sequence is shown below: gACTCTAGGCAGAGGTCTCAAAGG (SEQ ID NO: 434). The NGG PAM sequence (i.e., SpCas9) is underlined above. The lowercase “g” in the gRNA sequence indicates a mismatch in the sequence where a polymerase (e.g. Pol III) must initiate transcription. The guide RNA comprises sequence UUGAGACCUCUGCCUAGAGU (SEQ ID NO: 435).

[1036] For the above gRNA sequence, the scaffold sequence is as follows:

(SEQ ID NO: 436)
GTTTTAGAGCTAGAAATAGCAAGTTAAAATAAGGCTAGTCCGTTATCAA
CTTGAAAAAGTGGCACCGAGTCGGTGCTTTTTTT.

[1037] The ABE base editors used include ABE8 monomer variants: ABE8.1, ABE8.12, ABE8.13, ABE8.4, ABE8.5, ABE8.6, ABE8.7, ABE8.8, ABE8.9, ABE8.10, ABE8.11, ABE8.12, and ABE8.13. Positive control base editor ABE7.10 and a negative control were also used for comparison.

[1038] The ABE8 base editor variants had comparable or increased base editing activity compared to the ABE7.10 positive control with about 40% base editing correction of W401X (FIG. 62A). As shown in FIG. 62B, the percent of indel formation was comparable to the ABE7.10 positive control at about 0.4-0.6%.

[1039] A 20-nucleotide guide RNA (gRNA) was also tested targeting the IDUA W401X mutation with ABE8 base editor variants and compared to the 21-nucleotide gRNA described above (FIG. 63). The 20-nucleotide gRNA sequence, which hybridizes to the complement of the above DNA target sequence is shown below: ACTCTAGGCAGAGGTCTCAA AGG (SEQ ID NO: 437). The NGG PAM sequence (i.e., SpCas9) is underlined above.

[1040] For the above gRNA sequence, the scaffold sequence is as follows:

(SEQ ID NO: 436)
GTTTTAGAGCTAGAAATAGCAAGTTAAAATAAGGCTAGTCCGTTATCAA
CTTGAAAAAGTGGCACCGAGTCGGTGCTTTTTTT.

[1041] The ABE base editors used include ABE8 monomer variants: ABE8.1, ABE8.12, ABE8.13, ABE8.4, ABE8.5, ABE8.6, ABE8.7, ABE8.8, ABE8.9, ABE8.10, ABE8.11, ABE8.12, and ABE8.13. Positive control base editor ABE7.10 and a negative control were also used for comparison.

[1042] The ABE8 base editor variants had comparable base editing activity using either the 20-nucleotide gRNA or the 21-nucleotide gRNA with about 40% base editing correction of W401X (FIG. 63).

### Example 10. Hurler Syndrome Base Editing for the Correction of the W402X Mutation in the Human Alpha-L-Iduronidase (IDUA) Gene

[1043] Hurler Syndrome is the most severe form of mucopolysaccharidosis type 1 (MPS1). MPS1 is caused by mutations in alpha-L-iduronidase (IDUA) gene. In humans, a common mutation for MPS1 associated with a severe Hurler Syndrome phenotype is W402X. This mutation is a single base substitution that introduces a stop codon at position 402 (W402X) of the IDUA protein and is associated with an extremely severe clinical phenotype in homozygotes. ABEs may be used for the correction of the human IDUA gene by correcting the W402X mutation by efficiently converting A>G at a targeted site.

[1044] The W402X mutation was targeted for reversion to wild-type sequence using A•T to G•C DNA base editors (ABEs) that employ Cas9 moieties with validated protospacer adjacent motif (PAM) sequence preferences. As shown in FIG. 64, an ABE base editor and guide RNA (gRNA) can be used to target an adenosine (A) nucleobase (boxed) in the Homo sapiens IDUA nucleic acid sequence to correct the W402X mutation. An A>G correction at the SNP changes the stop codon at position 402 (W402X) to tryptophan in the IDUA polypeptide.

[1045] To determine which ABE8-Cas9 platform is able to most efficiently and precisely correct a targeted IDUA mutation, a Homo sapiens IDUA allele bearing the Hurler Syndrome W402X targetable mutation was genomically integrated in HEK293T cells by lentivirus transduction. The HEK293T cells were transfected and plated at 30,000 cells per well of a 48-well plate with 250 ng of gRNA and 750 ng of ABE8 variant base editor expression plasmid using Opti-MEM media and Lipofectamine 2000 as described above. The ABE8 base editor variants contained the NGG PAM sequence (i.e., SpCas9). The cells were lysed and prepped for sequencing 5 days post-transfection (with a media change at day 3 post-transfection) and analyzed for base editing at the desired site by miSeq analysis.

[1046] The DNA targeted/insert sequence in the Homo sapiens IDUA polynucleotide sequence is shown below and corresponds to nucleic acids 1076-1358 of the representative Homo sapiens IDUA gene sequence found under NCBI Reference Sequence No. NM_000203.5.

(SEQ ID NO: 438)
CCTTCGCGCAGCGCACGCTCACCGCGCGCTTCCAGGTCAACAACACCCG
CCCGCCGCACGTGCAGCTGTTGCGCAAGCCGGTGCTCACGGCCATGGGG
CTGCTGGCGCTGCTGGATGAGGAGCAGCTCTAGGCCGAAGTGTCGCAGG
CCGGGACCGTCCTGGACAGCAACCACACGGTGGGCGTCCTGGCCAGCGC
CCACCGCCCCCAGGGCCCGGCCGACGCCTGGCGCGCCGCGGTGCTGATC
TACGCGAGCGACGACACCCGCGCCCACCCCAACCGCAG

[1047] The above Homo sapiens target/insert sequence contains an “A” nucleobase (shown in bold and underlined), while the Homo sapiens IDUA gene sequence contains a “G” nucleobase at position 1205 of the IDUA sequence.

[1048] A 20-nucleotide guide RNA (gRNA) was tested targeting the W402X mutation with ABE8 base editor variants (FIG. 65A). The gRNA encompasses the scaffold sequence and the spacer sequence (target sequence) for disease-associated genes as provided herein or as determined based on the knowledge of the skilled practitioner and as would be understood to the skilled practitioner in the art. (See, e.g., Komor, A. C., et al., “Programmable editing of a target base in genomic DNA without double-stranded DNA cleavage” Nature 533, 420-424 (2016); Gaudelli, N. M., et al., “Programmable base editing of A•T to G•C in genomic DNA without DNA cleavage” Nature 551, 464-471 (2017); Komor, A C., et al., “Improved base excision repair inhibition and bacteriophage Mu Gam protein yields C:G-to-T:A base editors with higher efficiency and product purity” Science Advances 3:eaao4774 (2017), and Rees, H. A., et al., “Base editing: precision chemistry on the genome and transcriptome of living cells.” Nat Rev Genet. 2018 December; 19(12):770-788. doi: 10.1038/s41576-018-0059-1).

[1049] The gRNA sequence, which hybridizes to the complement of the above DNA target sequence is: GCTCTAGGCCGAAGTGTCGC AGG (SEQ ID NO: 439). The NGG PAM sequence (i.e., SpCas9) is underlined above.

[1050] For the above gRNA sequence, the scaffold sequence is as follows:

(SEQ ID NO: 436)
GTTTTAGAGCTAGAAATAGCAAGTTAAAATAAGGCTAGTCCGTTATCAA
CTTGAAAAAGTGGCACCGAGTCGGTGCTTTTTTT

[1051] The ABE base editors used include ABE8 monomer variants: ABE8.1, ABE8.2, ABE8.3, ABE8.4, ABE8.5, ABE8.6, ABE8.7, ABE8.8, ABE8.9, ABE8.10, ABE8.11, ABE8.12, and ABE8.13. Positive control base editor ABE7.10 and a negative control were also used for comparison.

[1052] The ABE8 base editor variants had comparable or increased base editing activity compared to the ABE7.10 positive control with about 30-40% base editing correction of W402X (FIG. 65A). As shown in FIG. 65B, the percent of indel formation was comparable or below the ABE7.10 positive control at about 0.2-0.5%.

[1053] The efficiency of A to G base editing of the target “A” nucleobase at position 6 in the IDUA nucleic acid sequence as detected by deep sequencing of PCR products is presented in FIGS. 66A-66O. Table 18 below summarizes the percent of A to G base editing at position 6 in the IDUA nucleic acid target site achieved by ABE8 base editor variants (FIGS. 66A-66M) compared with ABE7.10 positive control (FIG. 66N) and negative control (FIG. 66O).

TABLE 18
IDUA Target Site Base Editing Percentage
with Base Editor Variants.

| Sample | ABE | A to G Base Editing (%) |
|---|---|---|
| NMG280-1 | ABE8.1 | 31.17% |
| NMG280-2 | ABE8.1 | 31.65% |
| NMG280-3 | ABE8.1 | 33.61% |
| NMG281-1 | ABE8.2 | 41.89% |
| NMG281-2 | ABE8.2 | 40.96% |
| NMG281-3 | ABE8.2 | 35.02% |
| NMG282-1 | ABE8.3 | 34.07% |
| NMG282-2 | ABE8.3 | 31.86% |
| NMG282-3 | ABE8.3 | 30.78% |
| NMG283-1 | ABE8.4 | 32.72% |
| NMG283-2 | ABE8.4 | 31.87% |
| NMG283-3 | ABE8.4 | 27.74% |
| NMG284-1 | ABE8.5 | 8.11% |
| NMG284-2 | ABE8.5 | 10.02% |
| NMG284-3 | ABE8.5 | 9.5% |
| NMG285-1 | ABE8.6 | 39% |
| NMG285-2 | ABE8.6 | 31.94% |
| NMG285-3 | ABE8.6 | 37.55% |
| NMG286-1 | ABE8.7 | 39.84% |
| NMG286-2 | ABE8.7 | 32.14% |
| NMG286-3 | ABE8.7 | 40.85% |
| NMG287-1 | ABE8.8 | 38.92% |
| NMG287-2 | ABE8.8 | 38.87% |
| NMG287-3 | ABE8.8 | 35.53% |
| NMG288-1 | ABE8.9 | 36.73% |
| NMG288-2 | ABE8.9 | 38.97% |
| NMG288-3 | ABE8.9 | 28.23% |
| NMG289-1 | ABE8.10 | 34.1% |
| NMG289-2 | ABE8.10 | 33.7% |
| NMG289-3 | ABE8.10 | 39.92% |
| NMG290-1 | ABE8.11 | 41.41% |
| NMG290-2 | ABE8.11 | 36.78% |
| NMG290-3 | ABE8.11 | 39.83% |
| NMG291-1 | ABE8.12 | 37.87% |
| NMG291-2 | ABE8.12 | 45.05% |
| NMG291-3 | ABE8.12 | 35.94% |
| NMG292-1 | ABE8.13 | 34.44% |
| NMG292-2 | ABE8.13 | 33.73% |
| NMG292-3 | ABE8.13 | 39.7% |
| NP20-1 | ABE7.10 | 33.73% |
| NP20-2 | ABE7.10 | 33.93% |
| NP20-3 | ABE7.10 | 26.89% |
| Negct-1 | Negative Control | 0.04% |
| Negct-2 | Negative Control | 0.03% |

[1054] As shown in Table 18 and FIGS. 66A-66M, an average of about 33.9% A-to-G base editing was achieved at position 6 of the IDUA nucleic acid sequence, the targeted “A” nucleobase site, using ABE8 base editor variants. This was comparable to positive control ABE7.10 (FIG. 66N).

### Example 11. Cell Culture and Transfection

[1055] The HEK293T (293T) cell line was obtained from the American Tissue Culture Collection (ATCC). 293T cells were maintained in DMEM supplemented with 10% fetal bovine serum and 1% penicillin/streptomycin at 37° C. with 5% CO₂. All cell lines were transfected in 24-well plates with Lipofectamine 2000 (Invitrogen), following the manufacturer's instructions. The amount of DNA used for lipofection was 1 μg per well. Transfection efficiency was routinely higher than 80% for 293T cells as determined by fluorescent microscopy following delivery of a control GFP expression plasmid.

[1056] For plasmid transfections, HEK293T cells were plated and transfected with 250 ng of expression plasmid containing a U6 promoter and encoding the gRNA. and with 750 ng of expression plasmid encoding the Cas9/ABE8 variant base editor using Opti-MEM media and Lipofectamine 2000. The ABE8 base editor variants used included the NGG PAM sequence. The cells were maintained 37° C. with 5% CO₂ for 5 days, with a change of medicum at day 3 post transfection. Thereafter, the cells were lysed; genomic DNA was isolated and PCR was performed using standard procedures, typically using 20-100 ng of template DNA. After the addition of adapters (Illumina), the DNA was subjected to deep sequencing. Base editing at the desired site was analyzed by MiSeq analysis.

[1057] Deep sequencing was performed on PCR amplicons from genomic DNA or RNA harvested from duplicate transfections of 293T cells. After validating the quality of PCR product by gel electrophoresis, the PCR products were isolated by gel extraction, e.g., using the Zymoclean Gel DNA Recovery Kit (Zymo Research). Shotgun libraries were prepared without shearing. The library was quantified by qPCR and sequenced on one MiSeq Nano flowcell for 251 cycles from each end of the fragments using a MiSeq 500-cycle sequencing kit version 2. Fastq files were generated and demultiplexed with the bcl2fastq v2.17.1.14 Conversion Software (Illumina).

### Example 12: Base Editing Correction of Rett Syndrome Mutations

[1058] A lenti-HEK line containing a single copy of MECP2 with 6 Rett mutations, including R106W and R255X, was generated and used to screen guide RNA sequences and ABE variants. Plasmids for guide and ABE expression were transfected into the lenti-HEK line, and genomic DNA was collected and analyzed by NextGen sequencing for mutations at the target site. Referring to FIGS. 67 and 68, Guide 1 showed overall highest editing, with ABE 8.8, ABE 8.9, and ABE 8.13 working well with both Guides 1 and 2. The guide RNA sequences comprise a spacer CTTTTCACTTTTCCTGCCGGGG (SEQ ID NO: 305) (R255X), AGCTTCCATGTCCAGCCTTC (SEQ ID NO: 306) (R106W), ACCATGAAGTCAAAATCATT (SEQ ID NO: 307) (T158M), or GCTTTCAGCCCCGTTTCTTG (SEQ ID NO: 308) (R270X).

[1059] Base editor variants having different PAM recognition specificity are tested; the Cas9 substitutions corresponding to PAM alterations are shown in Table 19. *Variant 5 corresponds to 25% editing at R255X. The methods are similar to those for R106W described above, with mutations on ABEs generated by other groups. Referring to FIGS. 69 and Table 19 below, Mutations contributing to variant 5 showed the highest amount of editing at this particular locus.

TABLE 19

| variant | E1219V | R1335Q | T1337 | G1218 |
|---|---|---|---|---|
| 1 | F | V | T | |
| 2 | F | V | R | |
| 3 | F | V | Q | |
| 4 | F | V | L | |
| 5 | F | V | T | R |
| 6 | F | V | R | R |
| 7 | F | V | Q | R |
| 8 | F | V | L | R |
| 9 | L | L | T | |
| 10 | L | L | R | |
| 11 | L | L | Q | |
| 12 | L | L | L | |
| 13 | F | I | T | |
| 14 | F | I | R | |
| 15 | F | I | Q | |
| 16 | F | I | L | |
| 17 | F | G | C | |
| 18 | H | L | N | |
| 19 | F | G | C | A |
| 20 | H | L | N | V |
| 21 | L | A | W | |
| 22 | L | A | F | |
| 23 | L | A | Y | |
| 24 | I | A | W | |
| 25 | I | A | F | |
| 26 | I | A | Y | |

### Example 13: Hurler/IDUA Mutation Correction

[1060] A lenti-HEK line containing a single copy of MECP2 with Hurler mutations was generated and used to screen guide RNA sequences and variants as described above. Referring to FIGS. 70A-70C, correction of inherited IDUA loss of function (W402X) mutation was examined using base editor variants. Fibroblasts from two W402X homozygous Hurler patients (GM06214 and GM00798) as well as an unaffected heterozygous parent (GM00799) were obtained from Coriell. Patient-derived and BJ fibroblasts were electroporated with mRNA for ABE 8.8 and a human W402X guide. Genomic DNA was extracted with QuickExract lysis solution and sequenced with NextGen sequencing to assess A to G editing. Iduronidase activity was assessed by a spectrophotometric assay. Lysates were incubated with 4-methylumbelliferone-iduronide in an acidic buffer for 2 hours, then quenched with an alkaline solution. 4-methylumbelliferone cleavage was measured by fluorescence (365 nm excitation, 445 nm emission). High editing was observed in the patient fibroblasts, and this led to an increase in enzymatic activity comparable to that observed in the unaffected heterozygote, GM00799.

### Example 14: In Vivo Base Editing with ABE 8.8

[1061] Referring to FIG. 70, Viral genomes encoding split intein ABE8.8 and gRNAs for the murine ROSA26 locus were packaged into AAV9 and PHP.eB capsids. 9e11 total vg AAV9 (4.5e11 of each intein split) and 7.5e11 total vg PHP.eB (3.75e11 of each intein split) were injected into the lateral ventricle of C57BL/6 mice. 6 weeks later, brains and spinal cord were harvested and dissected for genomic DNA extraction and sequencing. AAV9 transduction was highest in the hippocampus, which is the closest structure to the lateral ventricle, reaching up to 13% editing.

### Example 15: ABE8 Variant Base Editing

[1062] To determine the optimal base editor for reverting a G1961E mutation in ABCA4, forty unique ABE8 variants were compared to ABE7.10 for making an A-to-G base conversion at the disease allele (FIGS. 72A-72B) in a lentiviral knock-in model cell line using a sgRNA with a 21-nt spacer sequence that we previously demonstrated as the optimal spacer length on this target site (FIG. 73). All variants provided measurable A-to-G editing at the disease allele and the wobble base. Editing at the wobble base results in a silent mutation and is not deleterious. Six of the best-performing variants were subsequently codon optimized and incorporated into a split AAV system for further validation. Because the size of the DNA sequences that encode the base editor, the sgRNA, and the expression regulatory elements exceed the packaging limit of a single AAV particle, the requisite parts can be divided between two AAV particles and co-delivered. In this delivery methodology, the gene encoding the base editor is split between two viruses, and a split intein is used to reconstitute the full-length protein after co-infection (FIG. 74). The split ABE8 variants lacking a wild type TadA domain (ABE8-m) were packaged into pairs of AAV2 vectors, one of which also encodes a single copy of a sgRNA targeting the wildtype ABCA4 site of interest. In this experiment editing was assessed at the wobble base of the ABCA4 G1961 codon as a surrogate for the disease allele that is not present in the wild type cells. Wild type ARPE-19 cells were co-transduced with the dual AAVs, and base editing rates were assessed on the 21-nt target sequence (FIGS. 75A-75B) of interest. ABE variant 7.9, 7.10, 8.5-m, 8.8-m, 8.9-m, and 8.18-m were equally efficient at converting the surrogate site 8A, however, variants 8.8-m, 8.9-m, and 8.18-m also catalyzed undesirable C-to-T conversion at position 5C. A variant of ABE7.10 wherein the wild type TadA domain was removed (ABE7.10-m) had an apparent 50% loss of activity compared to the parent ABE7.10 variant. These results show that variant ABE8.5-m is the most efficient editor at the site of interest that also lacks a wild type TadA domain, which reduces the total size of the base editor by 594 bp of DNA or 198 amino acid residues.

Guide RNA sequences target ABCA4 gene at sequence
(SEQ ID NO: 291)
GCTGTGTGTCGAAGTTCGCCCTGGAGAGGTG
or
(SEQ ID NO: 292)
GCTGTGTGTCGGAGTTCGCCCTGGAGAGGTG,
where the PAM sequence is underlined.
The guide RNA comprises a sequence
(SEQ ID NO: 293)
CACCUCUCCAGGGCGAACUUCGACACACAGC
or
CACCUCUCCAGGGCGAACUCCGACACACAGC (SEQ ID NO: 294).

[1063] The potential for off-target base editing within the human genome using the 21-nt spacer length sgRNA targeting the ABCA4 G1961E locus was assessed. In silico prediction of potential off target sites within the genome was performed by computationally scanning the human reference genome (GRCh38) for all imperfect matches to the ABCA4 G1961E gRNA protospacer sequence followed by a 3′ sequence matching the SpCas9 NGG PAM. All sequences containing up to 5 mismatches and a single RNA or DNA bulge were evaluated. Potential off-target sites were prioritized for experimental assessment based on (a) low number of mismatches, and (b) overlap with coding exons (as determined by GENCODE transcript annotations) and cancer-associated genes (as reported in the COSMIC cancer gene census). No predicted off-targets in the genome with three or fewer mismatches against the 21-nt spacer sequence were found by in silico analysis. We used a dual AAV system to co-deliver ABE7.10 and the 21-nt spacer sgRNA targeting the ABCA4 G1961E disease allele into wild type ARPE-19 cells and assessed editing by targeted amplicon sequencing of 28 in silico-predicted off target sites. None of the predicted off-target sites were significantly base edited in treated cells compared to untreated cells (FIGS. 76A-76B) and no significant indels were found at the off-target sites or at the on-target site (FIG. 77). The only significant editing observed occurred at the ABCA4 G1961 wobble base in the treated cells as would be expected since the sgRNA targeting the ABCA4 G1961E disease allele contains only a single mismatched base pair with the wild type allele present in these cells. These results indicate that the sgRNA does not promote off-target DNA editing at any of the in silico-predicted off-target sites that were assessed.

### Example 20: Primate Retina Examples

[1064] Non-human primate eyes were harvested 1-2 hours post-mortem and put in culture between 4-8 hours post-mortem. A 6 mm biopsy punch was used to take punches from the entire neural retina. The retina with the photoreceptor side facing down was placed on top of a nucleopore membrane in a 6-well tissue culture plate. Vector (10 ul at 1.26E+12 vg/ml) was pipetted between the neural retina and the membrane to form a bleb under the retinal tissue. Media was replaced every 3 days and tissues were incubated for 0-22 days. Tissues were collected at different timepoints and fixed in 10% neutral buffered formalin and processed for histology.

[1065] ‘Primate Retina Integrity’

[1066] Sections were immunolabeled with anti-Rhodopsin, anti-GFP, and biotinylated peanut agglutinin antibodies overnight at 4C. After washing in PBS, samples were incubated with secondary antibodies for 1 hour at room temperature. Slides were washed in PBS and mounted with a glycerol-based liquid mountant containing DAPI.

[1067] Retinal explants from non-human primates were harvested at day (D) 0 and 22. Histological staining comparing DO and D22 untransduced retinal explants showed cell types of the retina to be preserved when cultured up to 22 days. At D22, GFP expression was qualitatively brighter in retinal cultures exposed to Anc80L65.CMV.eGFP compared to a photoreceptor-specific GFP expression vector (Anc80L65.hGRK.eGFP). Transduction of retinal explants with Anc80L65.hGRK1.eGFP demonstrated GFP to be exclusively in the photoreceptor-containing outer nuclear layer (ONL), confirming photoreceptor-specific activity of the hGRK1 promoter. See, FIG. 78.

[1068] ‘Cas9 Expression in NHP’

[1069] Sections were immunolabeled with mouse and rabbit monoclonal Cas9 antibodies overnight at 4° C. After washing in PBS, samples were incubated with secondary antibodies for 1 hour at room temperature. Slides were washed in PBS and mounted with a glycerol-based liquid mountant containing DAPI.

[1070] Dual AAV2 particles encoding the optimized split ABE (ABE7.10, 8.5, 8.9) base editors were tested on non-human primate retinal explants. To test reconstitution of full-length based editors, following coinfection by AAV particles expressing each base editor-split intein halfs, tissues were collected at different timepoints and stained for Cas9 N and C-termini. We observed expression of both Cas9 N (green stain) and C (red stain)-termini as early as day 6 and maintained up to day 17 post infection suggesting a possible editing activity window for the base editors. These results establish that the dual AAV split-intein base editor expresses Cas9 in non-human primate retinal explants. See, FIG. 79.

### Other Embodiments

[1071] From the foregoing description, it will be apparent that variations and modifications may be made to the invention described herein to adopt it to various usages and conditions. Such embodiments are also within the scope of the following claims.

[1072] The recitation of a listing of elements in any definition of a variable herein includes definitions of that variable as any single element or combination (or subcombination) of listed elements. The recitation of an embodiment herein includes that embodiment as any single embodiment or in combination with any other embodiments or portions thereof.

[1073] All publications, patents, and patent applications mentioned in this specification are herein incorporated by reference to the same extent as if each individual publication, patent, or patent application was specifically and individually indicated to be incorporated by reference. Absent any indication otherwise, publications, patents, and patent applications mentioned in this specification are incorporated herein by reference in their entireties.

The application's sequence listing, which the Patent Office published only in electronic form, follows.

SEQUENCE LISTING (476 sequences)

SEQ ID NO: 1 - protein, 1368 aa, Streptococcus pyogenes [sequence omitted]

SEQ ID NO: 2 - protein, 167 aa, Escherichia coli
MSEVEFSHEYWMRHALTLAKRAWDEREVPVGAVLVHNNRVIGEGWNRPIGRHDPTAHAEIMALRQGGLVMQNYRLIDATLYVTLEPCVMCAGAMIHSRIGRVVFGARDAKTGAAGSLMDVLHHPGMNHRVEITEGILADECAALLSDFFRMRRQEIKAQKKAQSSTD

SEQ ID NO: 3 - protein, 2527 aa, Homo sapiens
MASGSCQGCEEDEETLKKLIVRLNNVQEGKQIETLVQILEDLLVFTYSERASKLFQGKNIHVPLLIVLDSYMRVASVQQVGWSLLCKLIEVCPGTMQSLMGPQDVGNDWEVLGVHQLILKMLTVHNASVNLSVIGLKTLDLLLTSGKITLLILDEESDIFMLIFDAMHSFPANDEVQKLGCKALHVLFERVSEEQLTEFVENKDYMILLSALTNFKDEEEIVLHVLHCLHSLAIPCNNVEVLMSGNVRCYNIVVEAMKAFPMSERIQEVSCCLLHRLTLGNFFNILVLNEVHEFVVKAVQQYPENAALQISALSCLALLTETIFLNQDLEEKNENQENDDEGEEDKLFWLEACYKALTWHRKNKHVQEAACWALNNLLMYQNSLHEKIGDEDGHFPAHREVMLSMLMHSSSKEVFQASANALSTLLEQNVNFRKILLSKGIHLNVLELMQKHIHSPEVAESGCKMLNHLFEGSNTSLDIMAAVVPKILTVMKRHETSLPVQLEALRAILHFIVPGMPEESREDTEFHHKLNMVKKQCFKNDIHKLVLAALNRFIGNPGIQKCGLKVISSIVHFPDALEMLSLEGAMDSVLHTLQMYPDDQEIQCLGLSLIGYLITKKNVFIGTGHLLAKILVSSLYRFKDVAEIQTKGFQTILAILKLSASFSKLLVHHSFDLVIFHQMSSNIMEQKDQQFLNLCCKCFAKVAMDDYLKNVMLERACDQNNSIMVECLLLLGADANQAKEGSSLICQVCEKESSPKLVELLLNSGSREQDVRKALTISIGKGDSQIISLLLRRLALDVANNSICLGGFCIGKVEPSWLGPLFPDKTSNLRKQTNIASTLARMVIRYQMKSAVEEGTASGSDGNFSEDVLSKFDEWTFIPDSSMDSVFAQSDDLDSEGSEGSFLVKKKSNSISVGEFYRDAVLQRCSPNLQRHSNSLGPIFDHEDLLKRKRKILSSDDSLRSSKLQSHMRHSDSISSLASEREYITSLDLSANELRDIDALSQKCCISVHLEHLEKLELHQNALTSFPQQLCETLKSLTHLDLHSNKFTSFPSYLLKMSCIANLDVSRNDIGPSVVLDPTVKCPTLKQFNLSYNQLSFVPENLTDVVEKLEQLILEGNKISGICSPLRLKELKILNLSKNHISSLSENFLEACPKVESFSARMNFLAAMPFLPPSMTILKLSQNKFSCIPEAILNLPHLRSLDMSSNDIQYLPGPAHWKSLNLRELLFSHNQISILDLSEKAYLWSRVEKLHLSHNKLKEIPPEIGCLENLTSLDVSYNLELRSFPNEMGKLSKIWDLPLDELHLNFDFKHIGCKAKDIIRFLQQRLKKAVPYNRMKLMIVGNTGSGKTTLLQQLMKTKKSDLGMQSATVGIDVKDWPIQIRDKRKRDLVLNVWDFAGREEFYSTHPHFMTQRALYLAVYDLSKGQAEVDAMKPWLFNIKARASSSPVILVGTHLDVSDEKQRKACMSKITKELLNKRGFPAIRDYHFVNATEESDALAKLRKTIINESLNFKIRDQLVVGQLIPDCYVELEKIILSERKNVPIEFPVIDRKRLLQLVRENQLQLDENELPHAVHFLNESGVLLHFQDPALQLSDLYFVEPKWLCKIMAQILTVKVEGCPKHPKGIISRRDVEKFLSKKRKFPKNYMSQYFKLLEKFQIALPIGEEYLLVPSSLSDHRPVIELPHCENSEIIIRLYEMPYFPMGFWSRLINRLLEISPYMLSGRERALRPNRMYWRQGIYLNWSPEAYCLVGSEVLDNHPESFLKITVPSCRKGCILLGQVVDHIDSLMEEWFPGLLEIDICGEGETLLKKWALYSFNDGEEHQKILLDDLMKKAEEGDLLVNPDQPRLTIPISQIAPDLILADLPRNIMLNNDELEFEQAPEFLLGDGSFGSVYRAAYEGEEVAVKIFNKHTSLRLLRQELVVLCHLHHPSLISLLAAGIRPRMLVMELASKGSLDRLLQQDKASLTRTLQHRIALHVADGLRYLHSAMIIYRDLKPHNVLLFTLYPNAAIIAKIADYGIAQYCCRMGIKTSEGTPGFRAPEVARGNVIYNQQADVYSFGLLLYDILTTGGRIVEGLKFPNEFDELEIQGKLPDPVKEYGCAPWPMVEKLIKQCLKENPQERPTSAQVFDILNSAELVCLTRRILLPKNVIVECMVATHHNSRNASIWLGCGHTDRGQLSFLDLNTEGYTSEEVADSRILCLALVHLPVEKESWIVSGTQSGTLLVINTEDGKKRHTLEKMTDSVTCLYCNSFSKQSKQKNFLLVGTADGKLAIFEDKTVKLKGAAPLKILNIGNVSTPLMCLSESTNSTERNVMWGGCGTKIFSFSNDFTIQKLIETRTSQLFSYAAFSDSNIITVVVDTALYIAKQNSPVVEVWDKKTEKLCGLIDCVHFLREVMVKENKESKHKMSYSGRVKTLCLQKNTALWIGTGGGHILLLDLSTRRLIRVIYNFCNSVRVMMTAQLGSLKNVMLVLGYNRKNTEGTQKQKEIQSCLTVWDINLPHEVQNLEKHIEVRKELAEKMRRTSVE

SEQ ID NO: 4 - protein, 653 aa, Homo sapiens
MRPLRPRAALLALLASLLAAPPVAPAEAPHLVHVDAARALWPLRRFWRSTGFCPPLPHSQADQYVLSWDQQLNLAYVGAVPHRGIKQVRTHWLLELVTTRGSTGRGLSYNFTHLDGYLDLLRENQLLPGFELMGSASGHFTDFEDKQQVFEWKDLVSSLARRYIGRYGLAHVSKWNFETWNEPDHHDFDNVSMTMQGFLNYYDACSEGLRAASPALRLGGPGDSFHTPPRSPLSWGLLRHCHDGTNFFTGEAGVRLDYISLHRKGARSSISILEQEKVVAQQIRQLFPKFADTPIYNDEADPLVGWSLPQPWRADVTYAAMVVKVIAQHQNLLLANTTSAFPYALLSNDNAFLSYHPHPFAQRTLTARFQVNNTRPPHVQLLRKPVLTAMGLLALLDEEQLWAEVSQAGTVLDSNHTVGVLASAHRPQGPADAWRAAVLIYASDDTRAHPNRSVAVTLRLRGVPPGPGLVYVTRYLDNGLCSPDGEWRRLGRPVFPTAEQFRRMRAAEDPVAAAPRPLPAGGRLTLRPALRLPSLLLVHVCARPEKPPGQVTRLRALPLTQGQLVLVWSDEHVGSKCLWTYEIQFSQDGKAYTPVSRKPSTFNLFVFSPDTGAVSGSYRVRALDYWARPGPFSDPVPYLEVPVPRGPPSPGNP

SEQ ID NO: 5 - protein, 486 aa, Homo sapiens
MVAGMLGLREEKSEDQDLQGLKDKPLKFKKVKKDKKEEKEGKHEPVQPSAHHSAEPAEAGKAETSEGSGSAPAVPEASASPKQRRSIIRDRGPMYDDPTLPEGWTRKLKQRKSGRSAGKYDVYLINPQGKAFRSKVELIAYFEKVGDTSLDPNDFDFTVTGRGSPSRREQKPPKKPKSPKAPGTGRGRGRPKGSGTTRPKAATSEGVQVKRVLEKSPGKLLVKMPFQTSPGGKAEGGGATTSTQVMVIKRPGRKRKAEADPQAIPKKRGRKPGSVVAAAAAEAKKKAVKESSIRSVQETVLPIKKRKTRETVSIEVKEVVKPLLVSTLGEKSGKGLKTCKSPGRKSKESSPKGRSSSASSPPKKEHHHHHHHSESPKAPVPLLPPLPPPPPEPESSEDPTSPPEPQDLSSSVCKEEKMPRGGSLESDGCPKEPAKTQPAVATAATAAEKYKHRGEGERKDIVSSSMPRPNREEPVDSRTPVTERVS

SEQ ID NO: 6 - protein, 2273 aa, Homo sapiens [sequence omitted]

SEQ ID NO: 7 - RNA, 21 nt, Artificial Sequence
  Description of Artificial Sequence: Synthetic oligonucleotide
gacucuaggcagaggucucaa

SEQ ID NO: 8 - RNA, 20 nt, Artificial Sequence
  Description of Artificial Sequence: Synthetic oligonucleotide
acucuaggcagaggucucaa

SEQ ID NO: 9 - RNA, 19 nt, Artificial Sequence
  Description of Artificial Sequence: Synthetic oligonucleotide
cucuaggccgaagugucgc

SEQ ID NO: 10 - RNA, 20 nt, Artificial Sequence
  Description of Artificial Sequence: Synthetic oligonucleotide
gcucuaggccgaagugucgc

SEQ ID NO: 11 - RNA, 20 nt, Artificial Sequence
  Description of Artificial Sequence: Synthetic oligonucleotide
aagcgcaagccuggagggaa

SEQ ID NO: 12 - RNA, 20 nt, Artificial Sequence
  Description of Artificial Sequence: Synthetic oligonucleotide
acuacagcauugcucaguac

SEQ ID NO: 13 - RNA, 20 nt, Artificial Sequence
  Description of Artificial Sequence: Synthetic oligonucleotide
cuuuucacuuccugccgggg

SEQ ID NO: 14 - RNA, 20 nt, Artificial Sequence
  Description of Artificial Sequence: Synthetic oligonucleotide
agcuuccauguccagccuuc

SEQ ID NO: 15 - RNA, 20 nt, Artificial Sequence
  Description of Artificial Sequence: Synthetic oligonucleotide
accaugaagucaaaaucauu

SEQ ID NO: 16 - RNA, 20 nt, Artificial Sequence
  Description of Artificial Sequence: Synthetic oligonucleotide
gcuuucagccccguuucuug

SEQ ID NO: 17 - RNA, 26 nt, Artificial Sequence
  Description of Artificial Sequence: Synthetic oligonucleotide
cuccagggcgaacuucgacacacagc

SEQ ID NO: 18 - protein, 304 aa, Homo sapiens
MGVFCLGPWGLGRKLRTPGKGPLQLLSRLCGDHLQAIPAKKAPAGQEEPGTPPSSPLSAEQLDRIQRNKAAALLRLAARNVPVGFGESWKKHLSGEFGKPYFIKLMGFVAEERKHYTVYPPPHQVFTWTQMCDIKDVKVVILGQDPYHGPNQAHGLCFSVQRPVPPPPSLENIYKELSTDIEDFVHPGHGDLSGWAKQGVLLLNAVLTVRAHQANSHKERGWEQFTDAVVSWLNQNSNGLVFLLWGSYAQKKGSAIDRKRHHVLQTAHPSPLSVYRGFFGCRHFSKTNELLQKSGKKPIDWKEL

SEQ ID NO: 19 - protein, 313 aa, Homo sapiens
MIGQKTLYSFFSPSPARKRHAPSPEPAVQGTGVAGVPEESGDAAAIPAKKAPAGQEEPGTPPSSPLSAEQLDRIQRNKAAALLRLAARNVPVGFGESWKKHLSGEFGKPYFIKLMGFVAEERKHYTVYPPPHQVFTWTQMCDIKDVKVVILGQDPYHGPNQAHGLCFSVQRPVPPPPSLENIYKELSTDIEDFVHPGHGDLSGWAKQGVLLLNAVLTVRAHQANSHKERGWEQFTDAVVSWLNQNSNGLVFLLWGSYAQKKGSAIDRKRHHVLQTAHPSPLSVYRGFFGCRHFSKTNELLQKSGKKPIDWKEL

SEQ ID NO: 20 - protein, 167 aa, Artificial Sequence
  Description of Artificial Sequence: Synthetic polypeptide
MSEVEFSHEYWMRHALTLAKRARDEREVPVGAVLVLNNRVIGEGWNRAIGLHDPTAHAEIMALRQGGLVMQNYRLIDATLYVTFEPCVMCAGAMIHSRIGRVVFGVRNAKTGAAGSLMDVLHYPGMNHRVEITEGILADECAALLCYFFRMPRQVFNAQKKAQSSTD

SEQ ID NO: 21 - protein, 167 aa, Artificial Sequence
  Description of Artificial Sequence: Synthetic polypeptide
MSEVEFSHEYWMRHALTLAKRARDEREVPVGAVLVLNNRVIGEGWNRAIGLHDPTAHAEIMALRQGGLVMQNYRLIDATLYVTFEPCVMCAGAMIHSRIGRVVFGVRNAKTGAAGSLMDVLHYPGMNHRVEITEGILADECAALLCTFFRMPRQVFNAQKKAQSSTD

SEQ ID NO: 22 - protein, 178 aa, Escherichia coli
MRRAFITGVFFLSEVEFSHEYWMRHALTLAKRAWDEREVPVGAVLVHNNRVIGEGWNRPIGRHDPTAHAEIMALRQGGLVMQNYRLIDATLYVTLEPCVMCAGAMIHSRIGRVVFGARDAKTGAAGSLMDVLHHPGMNHRVEITEGILADECAALLSDFFRMRRQEIKAQKKAQSSTD

SEQ ID NO: 23 - protein, 160 aa, Staphylococcus aureus
MGSHMTNDIYFMTLAIEEAKKAAQLGEVPIGAIITKDDEVIARAHNLRETLQQPTAHAEHIAIERAAKVLGSWRLEGCTLYVTLEPCVMCAGTIVMSRIPRVVYGADDPKGGCSGSLMNLLQQSNFNHRAIVDKGVLKEACSTLLTTFFKNLRANKKSTN

SEQ ID NO: 24 - protein, 161 aa, Bacillus subtilis
MTQDELYMKEAIKEAKKAEEKGEVPIGAVLVINGEIIARAHNLRETEQRSIAHAEMLVIDEACKALGTWRLEGATLYVTLEPCPMCAGAVVLSRVEKVVFGAFDPKGGCSGTLMNLLQEERFNHQAEVVSGVLEEECGGMLSAFFRELRKKKKAARKNLSE

SEQ ID NO: 25 - protein, 183 aa, Salmonella typhimurium
MPPAFITGVTSLSDVELDHEYWMRHALTLAKRAWDEREVPVGAVLVHNHRVIGEGWNRPIGRHDPTAHAEIMALRQGGLVLQNYRLLDTTLYVTLEPCVMCAGAMVHSRIGRVVFGARDAKTGAAGSLIDVLHHPGMNHRVEIIEGVLRDECATLLSDFFRMRRQEIKALKKADRAEGAGPAV

SEQ ID NO: 26 - protein, 164 aa, Shewanella putrefaciens
MDEYWMQVAMQMAEKAEAAGEVPVGAVLVKDGQQIATGYNLSISQHDPTAHAEILCLRSAGKKLENYRLLDATLYITLEPCAMCAGAMVHSRIARVVYGARDEKTGAAGTVVNLLQHPAFNHQVEVTSGVLAEACSAQLSRFFKRRRDEKKALKLAQRAQQGIE

SEQ ID NO: 27 - protein, 173 aa, Haemophilus influenzae
MDAAKVRSEFDEKMMRYALELADKAEALGEIPVGAVLVDDARNIIGEGWNLSIVQSDPTAHAEIIALRNGAKNIQNYRLLNSTLYVTLEPCTMCAGAILHSRIKRLVFGASDYKTGAIGSRFHFFDDYKMNHTLEITSGVLAEECSQKLSTFFQKRREEKKIEKALLKSLSDK

SEQ ID NO: 28 - protein, 161 aa, Caulobacter crescentus
MRTDESEDQDHRMMRLALDAARAAAEAGETPVGAVILDPSTGEVIATAGNGPIAAHDPTAHAEIAAMRAAAAKLGNYRLTDLTLVVTLEPCAMCAGAISHARIGRVVFGADDPKGGAVVHGPKFFAQPTCHWRPEVTGGVLADESADLLRGFFRARRKAKI

SEQ ID NO: 29 - protein, 179 aa, Geobacter sulfurreducens
MSSLKKTPIRDDAYWMGKAIREAAKAAARDEVPIGAVIVRDGAVIGRGHNLREGSNDPSAHAEMIAIRQAARRSANWRLTGATLYVTLEPCLMCMGAIILARLERVVFGCYDPKGGAAGSLYDLSADPRLNHQVRLSPGVCQEECGTMLSDFFRDLRRRKKAKATPALFIDERKVPPEP

SEQ ID NO: 30 - protein, 186 aa, Artificial Sequence
  Description of Artificial Sequence: Synthetic polypeptide
GSSGSETPGTSESATPESSGSEVEFSHEYWMRHALTLAKRARDEREVPVGAVLVLNNRVIGEGWNRAIGLHDPTAHAEIMALRQGGLVMQNYRLIDATLYVTFEPCVMCAGAMIHSRIGRVVFGVRNAKTGAAGSLMDVLHYPGMNHRVEITEGILADECAALLCYFFRMPRQVFNAQKKAQSSTD

SEQ ID NO: 31 - protein, 186 aa, Artificial Sequence
  Description of Artificial Sequence: Synthetic polypeptide
TAHAEIMALRQGGLVMQNYRLIDATLYVTFEPCVMCAGAMIHSRIGRVVFGVRNAKTGAAGSLMDVLHYPGMNHRVEITEGILADECAALLCYFFRMPRQVFNAQKKAQSSTDGSSGSETPGTSESATPESSGSEVEFSHEYWMRHALTLAKRARDEREVPVGAVLVLNNRVIGEGWNRAIGLHDP

SEQ ID NO: 32 - protein, 186 aa, Artificial Sequence
  Description of Artificial Sequence: Synthetic polypeptide
YRLIDATLYVTFEPCVMCAGAMIHSRIGRVVFGVRNAKTGAAGSLMDVLHYPGMNHRVEITEGILADECAALLCYFFRMPRQVFNAQKKAQSSTDGSSGSETPGTSESATPESSGSEVEFSHEYWMRHALTLAKRARDEREVPVGAVLVLNNRVIGEGWNRAIGLHDPTAHAEIMALRQGGLVMQN

SEQ ID NO: 33 - protein, 186 aa, Artificial Sequence
  Description of Artificial Sequence: Synthetic polypeptide
MNHRVEITEGILADECAALLCYFFRMPRQVFNAQKKAQSSTDGSSGSETPGTSESATPESSGSEVEFSHEYWMRHALTLAKRARDEREVPVGAVLVLNNRVIGEGWNRAIGLHDPTAHAEIMALRQGGLVMQNYRLIDATLYVTFEPCVMCAGAMIHSRIGRVVFGVRNAKTGAAGSLMDVLHYPG

SEQ ID NO: 34 - protein, 176 aa, Artificial Sequence
  Description of Artificial Sequence: Synthetic polypeptide
GSSGSETPGTSESATPESSGSEVEFSHEYWMRHALTLAKRARDEREVPVGAVLVLNNRVIGEGWNRAIGLHDPTAHAEIMALRQGGLVMQNYRLIDATLYVTFEPCVMCAGAMIHSRIGRVVFGVRNAKTGAAGSLMDVLHYPGMNHRVEITEGILADECAALLCYFFRMPRQVFN

SEQ ID NO: 35 - protein, 173 aa, Artificial Sequence
  Description of Artificial Sequence: Synthetic polypeptide
GSSGSETPGTSESATPESSGSEVEFSHEYWMRHALTLAKRARDEREVPVGAVLVLNNRVIGEGWNRAIGLHDPTAHAEIMALRQGGLVMQNYRLIDATLYVTFEPCVMCAGAMIHSRIGRVVFGVRNAKTGAAGSLMDVLHYPGMNHRVEITEGILADECAALLCYFFRMPRQ

SEQ ID NO: 36 - protein, 168 aa, Artificial Sequence
  Description of Artificial Sequence: Synthetic polypeptide
GSSGSETPGTSESATPESSGSEVEFSHEYWMRHALTLAKRARDEREVPVGAVLVLNNRVIGEGWNRAHAEIMALRQGGLVMQNYRLIDATLYVTFEPCVMCAGAMIHSRIGRVVFGVRNAKTGAAGSLMDVLHYPGMNHRVEITEGILADECAALLCYFFRMPRQVFN

SEQ ID NO: 37 - protein, 178 aa, Artificial Sequence
  Description of Artificial Sequence: Synthetic polypeptide
GSSGSETPGTSESATPESSGSEVEFSHEYWMRHALTLAKRARDEREVPVGAVLVLNNRVIGEGWNRAHAEIMALRQGGLVMQNYRLIDATLYVTFEPCVMCAGAMIHSRIGRVVFGVRNAKTGAAGSLMDVLHYPGMNHRVEITEGILADECAALLCYFFRMPRQVFNAQKKAQSSTD

SEQ ID NO: 38 - protein, 1410 aa, Artificial Sequence
  Description of Artificial Sequence: Synthetic polypeptide
EIGKATAKYFFYSNIMNFFKTEITLANGEIRKRPLIETNGETGEIVWDKGRDFATVRKVLSMPQVNIVKKTEVQTGGFSKESILPKRNSDKLIARKKDWDPKKYGGFMQPTVAYSVLVVAKVEKGKSKKLKSVKELLGITIMERSSFEKNPIDFLEAKGYKEVKKDLIIKLPKYSLFELENGRKRMLASAKFLQKGNELALPSKYVNFLYLASHYEKLKGSPEDNEQKQLFVEQHKHYLDEIIEQISEFSKRVILADANLDKVLSAYNKHRDKPIREQAENIIHLFTLTNLGAPRAFKYFDTTIARKEYRSTKEVLDATLIHQSITGLYETRIDLSQLGGDGGSGGSGGSGGSGGSGGSGGMDKKYSIGLAIGTNSVGWAVITDEYKVPSKKFKVLGNTDRHSIKKNLIGALLFDSGETAEATRLKRTARRRYTRRKNRICYLQEIFSNEMAKVDDSFFHRLEESFLVEEDKKHERHPIFGNIVDEVAYHEKYPTIYHLRKKLVDSTDKADLRLIYLALAHMIKFRGHFLIEGDLNPDNSDVDKLFIQLVQTYNQLFEENPINASGVDAKAILSARLSKSRRLENLIAQLPGEKKNGLFGNLIALSLGLTPNFKSNFDLAEDAKLQLSKDTYDDDLDNLLAQIGDQYADLFLAAKNLSDAILLSDILRVNTEITKAPLSASMIKRYDEHHQDLTLLKALVRQQLPEKYKEIFFDQSKNGYAGYIDGGASQEEFYKFIKPILEKMDGTEELLVKLNREDLLRKQRTFDNGSIPHQIHLGELHAILRRQEDFYPFLKDNREKIEKILTFRIPYYVGPLARGNSRFAWMTRKSEETITPWNFEEVVDKGASAQSFIERMTNFDKNLPNEKVLPKHSLLYEYFTVYNELTKVKYVTEGMRKPAFLSGEQKKAIVDLLFKTNRKVTVKQLKEDYFKKIECFDSVEISGVEDRFNASLGTYHDLLKIIKDKDFLDNEENEDILEDIVLTLTLFEDREMIEERLKTYAHLFDDKVMKQLKRRRYTGWGRLSRKLINGIRDKQSGKTILDFLKSDGFANRNFMQLIHDDSLTFKEDIQKAQVSGQGDSLHEHIANLAGSPAIKKGILQTVKVVDELVKVMGRHKPENIVIEMARENQTTQKGQKNSRERMKRIEEGIKELGSQILKEHPVENTQLQNEKLYLYYLQNGRDMYVDQELDINRLSDYDVDHIVPQSFLKDDSIDNKVLTRSDKNRGKSDNVPSEEVVKKMKNYWRQLLNAKLITQRKFDNLTKAERGGLSELDKAGFIKRQLVETRQITKHVAQILDSRMNTKYDENDKLIREVKVITLKSKLVSDFRKDFQFYKVREINNYHHAHDAYLNAVVGTALIKKYPKLESEFVYGDYKVYDVRKMIAKSEQEGADKRTADGSEFESPKKKRKV

SEQ ID NO: 39 - DNA, 8877 bp, Artificial Sequence
  Description of Artificial Sequence: Synthetic polynucleotide
atatgccaagtacgccccctattgacgtcaatgacggtaaatggcccgcctggcattatgcccagtacatgaccttatgggactttcctacttggcagtacatctacgtattagtcatcgctattaccatggtgatgcggttttggcagtacatcaatgggcgtggatagcggtttgactcacggggatttccaagtctccaccccattgacgtcaatgggagtttgttttggcaccaaaatcaacgggactttccaaaatgtcgtaacaactccgccccattgacgcaaatgggcggtaggcgtgtacggtgggaggtctatataagcagagctggtttagtgaaccgtcagatccgctagagatccgcggccgctaatacgactcactatagggagagccgccaccatgagctcagagactggcccagtggctgtggaccccacattgagacggcggatcgagccccatgagtttgaggtattcttcgatccgagagagctccgcaaggagacctgcctgctttacgaaattaattgggggggccggcactccatttggcgacatacatcacagaacactaacaagcacgtcgaagtcaacttcatcgagaagttcacgacagaaagatatttctgtccgaacacaaggtgcagcattacctggtttctcagctggagcccatgcggcgaatgtagtagggccatcactgaattcctgtcaaggtatccccacgtcactctgtttatttacatcgcaaggctgtaccaccacgctgacccccgcaatcgacaaggcctgcgggatttgatctcttcaggtgtgactatccaaattatgactgagcaggagtcaggatactgctggagaaactttgtgaattatagcccgagtaatgaagcccactggcctaggtatccccatctgtgggtacgactgtacgttcttgaactgtactgcatcatactgggcctgcctccttgtctcaacattctgagaaggaagcagccacagctgacattctttaccatcgctcttcagtcttgtcattaccagcgactgcccccacacattctctgggccaccgggttgaaatctggtggttcttctggtggttctagcggcagcgagactcccgggacctcagagtccgccacacccgaaagttctggtggttcttctggtggttctgataaaaagtattctattggtttagccatcggcactaattccgttggatgggctgtcataaccgatgaatacaaagtaccttcaaagaaatttaaggtgttggggaacacagaccgtcattcgattaaaaagaatcttatcggtgccctcctattcgatagtggcgaaacggcagaggcgactcgcctgaaacgaaccgctcggagaaggtatacacgtcgcaagaaccgaatatgttacttacaagaaatttttagcaatgagatggccaaagttgacgattctttctttcaccgtttggaagagtccttccttgtcgaagaggacaagaaacatgaacggcaccccatctttggaaacatagtagatgaggtggcatatcatgaaaagtacccaacgatttatcacctcagaaaaaagctagttgactcaactgataaagcggacctgaggttaatctacttggctcttgcccatatgataaagttccgtgggcactttctcattgagggtgatctaaatccggacaactcggatgtcgacaaactgttcatccagttagtacaaacctataatcagttgtttgaagagaaccctataaatgcaagtggcgtggatgcgaaggctattcttagcgcccgcctctctaaatcccgacggctagaaaacctgatcgcacaattacccggagagaagaaaaatgggttgttcggtaaccttatagcgctctcactaggcctgacaccaaattttaagtcgaacttcgacttagctgaagatgccaaattgcagcttagtaaggacacgtacgatgacgatctcgacaatctactggcacaaattggagatcagtatgcggacttatttttggctgccaaaaaccttagcgatgcaatcctcctatctgacatactgagagttaatactgagattaccaaggcgccgttatccgcttcaatgatcaaaaggtacgatgaacatcaccaagacttgacacttctcaaggccctagtccgtcagcaactgcctgagaaatataaggaaatattctttgatcagtcgaaaaacgggtacgcaggttatattgacggcggagcgagtcaagaggaattctacaagtttatcaaacccatattagagaagatggatgggacggaagagttgcttgtaaaactcaatcgcgaagatctactgcgaaagcagcggactttcgacaacggtagcattccacatcaaatccacttaggcgaattgcatgctatacttagaaggcaggaggatttttatccgttcctcaaagacaatcgtgaaaagattgagaaaatcctaacctttcgcataccttactatgtgggacccctggcccgagggaactctcggttcgcatggatgacaagaaagtccgaagaaacgattactccatggaattttgaggaagttgtcgataaaggtgcgtcagctcaatcgttcatcgagaggatgaccaactttgacaagaatttaccgaacgaaaaagtattgcctaagcacagtttactttacgagtatttcacagtgtacaatgaactcacgaaagttaagtatgtcactgagggcatgcgtaaacccgcctttctaagcggagaacagaagaaagcaatagtagatctgttattcaagaccaaccgcaaagtgacagttaagcaattgaaagaggactactttaagaaaattgaatgcttcgattctgtcgagatctccggggtagaagatcgatttaatgcgtcacttggtacgtatcatgacctcctaaagataattaaagataaggacttcctggataacgaagagaatgaagatatcttagaagatatagtgttgactcttaccctctttgaagatcgggaaatgattgaggaaagactaaaaacatacgctcacctgttcgacgataaggttatgaaacagttaaagaggcgtcgctatacgggctggggacgattgtcgcggaaacttatcaacgggataagagacaagcaaagtggtaaaactattctcgattttctaaagagcgacggcttcgccaataggaactttatgcagctgatccatgatgactctttaaccttcaaagaggatatacaaaaggcacaggtttccggacaaggggactcattgcacgaacatattgcgaatcttgctggttcgccagccatcaaaaagggcatactccagacagtcaaagtagtggatgagctagttaaggtcatgggacgtcacaaaccggaaaacattgtaatcgagatggcacgcgaaaatcaaacgactcagaaggggcaaaaaaacagtcgagagcggatgaagagaatagaagagggtattaaagaactgggcagccagatcttaaaggagcatcctgtggaaaatacccaattgcagaacgagaaactttacctctattacctacaaaatggaagggacatgtatgttgatcaggaactggacataaaccgtttatctgattacgacgtcgatcacattgtaccccaatcctttttgaaggacgattcaatcgacaataaagtgcttacacgctcggataagaaccgagggaaaagtgacaatgttccaagcgaggaagtcgtaaagaaaatgaagaactattggcggcagctcctaaatgcgaaactgataacgcaaagaaagttcgataacttaactaaagctgagaggggtggcttgtctgaacttgacaaggccggatttattaaacgtcagctcgtggaaacccgccaaatcacaaagcatgttgcacagatactagattcccgaatgaatacgaaatacgacgagaacgataagctgattcgggaagtcaaagtaatcactttaaagtcaaaattggtgtcggacttcagaaaggattttcaattctataaagttagggagataaataactaccaccatgcgcacgacgcttatcttaatgccgtcgtagggaccgcactcattaagaaatacccgaagctagaaagtgagtttgtgtatggtgattacaaagtttatgacgtccgtaagatgatcgcgaaaagcgaacaggagataggcaaggctacagccaaatacttcttttattctaacattatgaatttctttaagacggaaatcactctggcaaacggagagatacgcaaacgacctttaattgaaaccaatggggagacaggtgaaatcgtatgggataagggccgggacttcgcgacggtgagaaaagttttgtccatgccccaagtcaacatagtaaagaaaactgaggtgcagaccggagggttttcaaaggaatcgattcttccaaaaaggaatagtgataagctcatcgctcgtaaaaaggactgggacccgaaaaagtacggtggcttcgatagccctacagttgcctattctgtcctagtagtggcaaaagttgagaagggaaaatccaagaaactgaagtcagtcaaagaattattggggataacgattatggagcgctcgtcttttgaaaagaaccccatcgacttccttgaggcgaaaggttacaaggaagtaaaaaaggatctcataattaaactaccaaagtatagtctgtttgagttagaaaatggccgaaaacggatgttggctagcgccggagagcttcaaaaggggaacgaactcgcactaccgtctaaatacgtgaatttcctgtatttagcgtcccattacgagaagttgaaaggttcacctgaagataacgaacagaagcaactttttgttgagcagcacaaacattatctcgacgaaatcatagagcaaatttcggaattcagtaagagagtcatcctagctgatgccaatctggacaaagtattaagcgcatacaacaagcacagggataaacccatacgtgagcaggcggaaaatattatccatttgtttactcttaccaacctcggcgctccagccgcattcaagtattttgacacaacgatagatcgcaaacgatacacttctaccaaggaggtgctagacgcgacactgattcaccaatccatcacgggattatatgaaactcggatagatttgtcacagcttgggggtgactctggtggttctggaggatctggtggttctactaatctgtcagatattattgaaaaggagaccggtaagcaactggttatccaggaatccatcctcatgctcccagaggaggtggaagaagtcattgggaacaagccggaaagcgatatactcgtgcacaccgcctacgacgagagcaccgacgagaatgtcatgcttctgactagcgacgcccctgaatacaagccttgggctctggtcatacaggatagcaacggtgagaacaagattaagatgctctctggtggttctggaggatctggtggttctactaatctgtcagatattattgaaaaggagaccggtaagcaactggttatccaggaatccatcctcatgctcccagaggaggtggaagaagtcattgggaacaagccggaaagcgatatactcgtgcacaccgcctacgacgagagcaccgacgagaatgtcatgcttctgactagcgacgcccctgaatacaagccttgggctctggtcatacaggatagcaacggtgagaacaagattaagatgctctctggtggttctcccaagaagaagaggaaagtctaaccggtcatcatcaccatcaccattgagtttaaacccgctgatcagcctcgactgtgccttctagttgccagccatctgttgtttgcccctcccccgtgccttccttgaccctggaaggtgccactcccactgtcctttcctaataaaatgaggaaattgcatcgcattgtctgagtaggtgtcattctattctggggggtggggtggggcaggacagcaagggggaggattgggaagacaatagcaggcatgctggggatgcggtgggctctatggcttctgaggcggaaagaaccagctggggctcgataccgtcgacctctagctagagcttggcgtaatcatggtcatagctgtttcctgtgtgaaattgttatccgctcacaattccacacaacatacgagccggaagcataaagtgtaaagcctagggtgcctaatgagtgagctaactcacattaattgcgttgcgctcactgcccgctttccagtcgggaaacctgtcgtgccagctgcattaatgaatcggccaacgcgcggggagaggcggtttgcgtattgggcgctcttccgcttcctcgctcactgactcgctgcgctcggtcgttcggctgcggcgagcggtatcagctcactcaaaggcggtaatacggttatccacagaatcaggggataacgcaggaaagaacatgtgagcaaaaggccagcaaaaggccaggaaccgtaaaaaggccgcgttgctggcgtttttccataggctccgcccccctgacgagcatcacaaaaatcgacgctcaagtcagaggtggcgaaacccgacaggactataaagataccaggcgtttccccctggaagctccctcgtgcgctctcctgttccgaccctgccgcttaccggatacctgtccgcctttctcccttcgggaagcgtggcgctttctcatagctcacgctgtaggtatctcagttcggtgtaggtcgttcgctccaagctgggctgtgtgcacgaaccccccgttcagcccgaccgctgcgccttatccggtaactatcgtcttgagtccaacccggtaagacacgacttatcgccactggcagcagccactggtaacaggattagcagagcgaggtatgtaggcggtgctacagagttcttgaagtggtggcctaactacggctacactagaagaacagtatttggtatctgcgctctgctgaagccagttaccttcggaaaaagagttggtagctcttgatccggcaaacaaaccaccgctggtagcggtggtttttttgtttgcaagcagcagattacgcgcagaaaaaaaggatctcaagaagatcctttgatcttttctacggggtctgacgctcagtggaacgaaaactcacgttaagggattttggtcatgagattatcaaaaaggatcttcacctagatccttttaaattaaaaatgaagttttaaatcaatctaaagtatatatgagtaaacttggtctgacagttaccaatgcttaatcagtgaggcacctatctcagcgatctgtctatttcgttcatccatagttgcctgactccccgtcgtgtagataactacgatacgggagggcttaccatctggccccagtgctgcaatgataccgcgagacccacgctcaccggctccagatttatcagcaataaaccagccagccggaagggccgagcgcagaagtggtcctgcaactttatccgcctccatccagtctattaattgttgccgggaagctagagtaagtagttcgccagttaatagtttgcgcaacgttgttgccattgctacaggcatcgtggtgtcacgctcgtcgtttggtatggcttcattcagctccggttcccaacgatcaaggcgagttacatgatcccccatgttgtgcaaaaaagcggttagctccttcggtcctccgatcgttgtcagaagtaagttggccgcagtgttatcactcatggttatggcagcactgcataattctcttactgtcatgccatccgtaagatgcttttctgtgactggtgagtactcaaccaagtcattctgagaatagtgtatgcggcgaccgagttgctcttgcccggcgtcaatacgggataataccgcgccacatagcagaactttaaaagtgctcatcattggaaaacgttcttcggggcgaaaactctcaaggatcttaccgctgttgagatccagttcgatgtaacccactcgtgcacccaactgatcttcagcatcttttactttcaccagcgtttctgggtgagcaaaaacaggaaggcaaaatgccgcaaaaaagggaataagggcgacacggaaatgttgaatactcatactcttcctttttcaatattattgaagcatttatcagggttattgtctcatgagcggatacatatttgaatgtatttagaaaaataaacaaataggggttccgcgcacatttccccgaaaagtgccacctgacgtcgacggatcgggagatcgatctcccgatcccctagggtcgactctcagtacaatctgctctgatgccgcatagttaagccagtatctgctccctgcttgtgtgttggaggtcgctgagtagtgcgcgagcaaaatttaagctacaacaaggcaaggcttgaccgacaattgcatgaagaatctgcttagggttaggcgttttgcgctgcttcgcgatgtacgggccagatatacgcgttgacattgattattgactagttattaatagtaatcaattacggggtcattagttcatagcccatatatggagttccgcgttacataacttacggtaaatggcccgcctggctgaccgcccaacgacccccgcccattgacgtcaataatgacgtatgttcccatagtaacgccaatagggactttccattgacgtcaatgggtggagtatttacggtaaactgcccacttggcagtacatcaagtgtatc

SEQ ID NO: 40 - protein, 1824 aa, Artificial Sequence
  Description of Artificial Sequence: Synthetic polypeptide
MSSETGPVAVDPTLRRRIEPHEFEVFFDPRELRKETCLLYEINWGGRHSIWRHTSQNTNKHVEVNFIEKFTTERYFCPNTRCSITWFLSWSPCGECSRAITEFLSRYPHVTLFIYIARLYHHADPRNRQGLRDLISSGVTIQIMTEQESGYCWRNFVNYSPSNEAHWPRYPHLWVRLYVLELYCIILGLPPCLNILRRKQPQLTFFTIALQSCHYQRLPPHILWATGLKSGGSSGGSSGSETPGTSESATPESSGGSSGGSDKKYSIGLAIGTNSVGWAVITDEYKVPSKKFKVLGNTDRHSIKKNLIGALLFDSGETAEATRLKRTARRRYTRRKNRICYLQEIFSNEMAKVDDSFFHRLEESFLVEEDKKHERHPIFGNIVDEVAYHEKYPTIYHLRKKLVDSTDKADLRLIYLALAHMIKFRGHFLIEGDLNPDNSDVDKLFIQLVQTYNQLFEENPINASGVDAKAILSARLSKSRRLENLIAQLPGEKKNGLFGNLIALSLGLTPNFKSNFDLAEDAKLQLSKDTYDDDLDNLLAQIGDQYADLFLAAKNLSDAILLSDILRVNTEITKAPLSASMIKRYDEHHQDLTLLKALVRQQLPEKYKEIFFDQSKNGYAGYIDGGASQEEFYKFIKPILEKMDGTEELLVKLNREDLLRKQRTFDNGSIPHQIHLGELHAILRRQEDFYPFLKDNREKIEKILTFRIPYYVGPLARGNSRFAWMTRKSEETITPWNFEEVVDKGASAQSFIERMTNFDKNLPNEKVLPKHSLLYEYFTVYNELTKVKYVTEGMRKPAFLSGEQKKAIVDLLFKTNRKVTVKQLKEDYFKKIECFDSVEISGVEDRFNASLGTYHDLLKIIKDKDFLDNEENEDILEDIVLTLTLFEDREMIEERLKTYAHLFDDKVMKQLKRRRYTGWGRLSRKLINGIRDKQSGKTILDFLKSDGFANRNFMQLIHDDSLTFKEDIQKAQVSGQGDSLHEHIANLAGSPAIKKGILQTVKVVDELVKVMGRHKPENIVIEMARENQTTQKGQKNSRERMKRIEEGIKELGSQILKEHPVENTQLQNEKLYLYYLQNGRDMYVDQELDINRLSDYDVDHIVPQSFLKDDSIDNKVLTRSDKNRGKSDNVPSEEVVKKMKNYWRQLLNAKLITQRKFDNLTKAERGGLSELDKAGFIKRQLVETRQITKHVAQILDSRMNTKYDENDKLIREVKVITLKSKLVSDFRKDFQFYKVREINNYHHAHDAYLNAVVGTALIKKYPKLESEFVYGDYKVYDVRKMIAKSEQEIGKATAKYFFYSNIMNFFKTEITLANGEIRKRPLIETNGETGEIVWDKGRDFATVRKVLSMPQVNIVKKTEVQTGGFSKESILPKRNSDKLIARKKDWDPKKYGGFDSPTVAYSVLVVAKVEKGKSKKLKSVKELLGITIMERSSFEKNPIDFLEAKGYKEVKKDLIIKLPKYSLFELENGRKRMLASAGELQKGNELALPSKYVNFLYLASHYEKLKGSPEDNEQKQLFVEQHKHYLDEIIEQISEFSKRVILADANLDKVLSAYNKHRDKPIREQAENIIHLFTLTNLGAPAAFKYFDTTIDRKRYTSTKEVLDATLIHQSITGLYETRIDLSQLGGDSGGSGGSGGSTNLSDIIEKETGKQLVIQESILMLPEEVEEVIGNKPESDILVHTAYDESTDENVMLLTSDAPEYKPWALVIQDSNGENKIKMLSGGSGGSGGSTNLSDIIEKETGKQLVIQESILMLPEEVEEVIGNKPESDILVHTAYDESTDENVMLLTSDAPEYKPWALVIQDSNGENKIKMLSGGSPKKKRK

SEQ ID NO: 41 - DNA, 8811 bp, Artificial Sequence
  Description of Artificial Sequence: Synthetic polynucleotide
atatgccaagtacgccccctattgacgtcaatgacggtaaatggcccgcctggcattatgcccagtacatgaccttatgggactttcctacttggcagtacatctacgtattagtcatcgctattaccatggtgatgcggttttggcagtacatcaatgggcgtggatagcggtttgactcacggggatttccaagtctccaccccattgacgtcaatgggagtttgttttggcaccaaaatcaacgggactttccaaaatgtcgtaacaactccgccccattgacgcaaatgggcggtaggcgtgtacggtgggaggtctatataagcagagctggtttagtgaaccgtcagatccgctagagatccgcggccgctaatacgactcactatagggagagccgccaccatgaaacggacagccgacggaagcgagttcgagtcaccaaagaagaagcggaaagtctctgaagtcgagtttagccacgagtattggatgaggcacgcactgaccctggcaaagcgagcatgggatgaaagagaagtccccgtgggcgccgtgctggtgcacaacaatagagtgatcggagagggatggaacaggccaatcggccgccacgaccctaccgcacacgcagagatcatggcactgaggcagggaggcctggtcatgcagaattaccgcctgatcgatgccaccctgtatgtgacactggagccatgcgtgatgtgcgcaggagcaatgatccacagcaggatcggaagagtggtgttcggagcacgggacgccaagaccggcgcagcaggctccctgatggatgtgctgcaccaccccggcatgaaccaccgggtggagatcacagagggaatcctggcagacgagtgcgccgccctgctgagcgatttctttagaatgcggagacaggagatcaaggcccagaagaaggcacagagctccaccgactctggaggatctagcggaggatcctctggaagcgagacaccaggcacaagcgagtccgccacaccagagagctccggcggctcctccggaggatcctctgaggtggagttttcccacgagtactggatgagacatgccctgaccctggccaagagggcacgcgatgagagggaggtgcctgtgggagccgtgctggtgctgaacaatagagtgatcggcgagggctggaacagagccatcggcctgcacgacccaacagcccatgccgaaattatggccctgagacagggcggcctggtcatgcagaactacagactgattgacgccaccctgtacgtgacattcgagccttgcgtgatgtgcgccggcgccatgatccactctaggatcggccgcgtggtgtttggcgtgaggaacgcaaaaaccggcgccgcaggctccctgatggacgtgctgcactaccccggcatgaatcaccgcgtcgaaattaccgagggaatcctggcagatgaatgtgccgccctgctgtgctatttctttcggatgcctagacaggtgttcaatgctcagaagaaggcccagagctccaccgactccggaggatctagcggaggctcctctggctctgagacacctggcacaagcgagagcgcaacacctgaaagcagcgggggcagcagcggggggtcagacaagaagtacagcatcggcctggccatcggcaccaactctgtgggctgggccgtgatcaccgacgagtacaaggtgcccagcaagaaattcaaggtgctgggcaacaccgaccggcacagcatcaagaagaacctgatcggagccctgctgttcgacagcggcgaaacagccgaggccacccggctgaagagaaccgccagaagaagatacaccagacggaagaaccggatctgctatctgcaagagatcttcagcaacgagatggccaaggtggacgacagcttcttccacagactggaagagtccttcctggtggaagaggataagaagcacgagcggcaccccatcttcggcaacatcgtggacgaggtggcctaccacgagaagtaccccaccatctaccacctgagaaagaaactggtggacagcaccgacaaggccgacctgcggctgatctatctggccctggcccacatgatcaagttccggggccacttcctgatcgagggcgacctgaaccccgacaacagcgacgtggacaagctgttcatccagctggtgcagacctacaaccagctgttcgaggaaaaccccatcaacgccagcggcgtggacgccaaggccatcctgtctgccagactgagcaagagcagacggctggaaaatctgatcgcccagctgcccggcgagaagaagaatggcctgttcggaaacctgattgccctgagcctgggcctgacccccaacttcaagagcaacttcgacctggccgaggatgccaaactgcagctgagcaaggacacctacgacgacgacctggacaacctgctggcccagatcggcgaccagtacgccgacctgtttctggccgccaagaacctgtccgacgccatcctgctgagcgacatcctgagagtgaacaccgagatcaccaaggcccccctgagcgcctctatgatcaagagatacgacgagcaccaccaggacctgaccctgctgaaagctctcgtgcggcagcagctgcctgagaagtacaaagagattttcttcgaccagagcaagaacggctacgccggctacattgacggcggagccagccaggaagagttctacaagttcatcaagcccatcctggaaaagatggacggcaccgaggaactgctcgtgaagctgaacagagaggacctgctgcggaagcagcggaccttcgacaacggcagcatcccccaccagatccacctgggagagctgcacgccattctgcggcggcaggaagatttttacccattcctgaaggacaaccgggaaaagatcgagaagatcctgaccttccgcatcccctactacgtgggccctctggccaggggaaacagcagattcgcctggatgaccagaaagagcgaggaaaccatcaccccctggaacttcgaggaagtggtggacaagggcgcttccgcccagagcttcatcgagcggatgaccaacttcgataagaacctgcccaacgagaaggtgctgcccaagcacagcctgctgtacgagtacttcaccgtgtataacgagctgaccaaagtgaaatacgtgaccgagggaatgagaaagcccgccttcctgagcggcgagcagaaaaaggccatcgtggacctgctgttcaagaccaaccggaaagtgaccgtgaagcagctgaaagaggactacttcaagaaaatcgagtgcttcgactccgtggaaatctccggcgtggaagatcggttcaacgcctccctgggcacataccacgatctgctgaaaattatcaaggacaaggacttcctggacaatgaggaaaacgaggacattctggaagatatcgtgctgaccctgacactgtttgaggacagagagatgatcgaggaacggctgaaaacctatgcccacctgttcgacgacaaagtgatgaagcagctgaagcggcggagatacaccggctggggcaggctgagccggaagctgatcaacggcatccgggacaagcagtccggcaagacaatcctggatttcctgaagtccgacggcttcgccaacagaaacttcatgcagctgatccacgacgacagcctgacctttaaagaggacatccagaaagcccaggtgtccggccagggcgatagcctgcacgagcacattgccaatctggccggcagccccgccattaagaagggcatcctgcagacagtgaaggtggtggacgagctcgtgaaagtgatgggccggcacaagcccgagaacatcgtgatcgaaatggccagagagaaccagaccacccagaagggacagaagaacagccgcgagagaatgaagcggatcgaagagggcatcaaagagctgggcagccagatcctgaaagaacaccccgtggaaaacacccagctgcagaacgagaagctgtacctgtactacctgcagaatgggcgggatatgtacgtggaccaggaactggacatcaaccggctgtccgactacgatgtggaccatatcgtgcctcagagctttctgaaggacgactccatcgacaacaaggtgctgaccagaagcgacaagaaccggggcaagagcgacaacgtgccctccgaagaggtcgtgaagaagatgaagaactactggcggcagctgctgaacgccaagctgattacccagagaaagttcgacaatctgaccaaggccgagagaggcggcctgagcgaactggataaggccggcttcatcaagagacagctggtggaaacccggcagatcacaaagcacgtggcacagatcctggactcccggatgaacactaagtacgacgagaatgacaagctgatccgggaagtgaaagtgatcaccctgaagtccaagctggtgtccgatttccggaaggatttccagttttacaaagtgcgcgagatcaacaactaccaccacgcccacgacgcctacctgaacgccgtcgtgggaaccgccctgatcaaaaagtaccctaagctggaaagcgagttcgtgtacggcgactacaaggtgtacgacgtgcggaagatgatcgccaagagcgagcaggaaatcggcaaggctaccgccaagtacttcttctacagcaacatcatgaactttttcaagaccgagattaccctggccaacggcgagatccggaagcggcctctgatcgagacaaacggcgaaaccggggagatcgtgtgggataagggccgggattttgccaccgtgcggaaagtgctgagcatgccccaagtgaatatcgtgaaaaagaccgaggtgcagacaggcggcttcagcaaagagtctatcctgcccaagaggaacagcgataagctgatcgccagaaagaaggactgggaccctaagaagtacggcggcttcgacagccccaccgtggcctattctgtgctggtggtggccaaagtggaaaagggcaagtccaagaaactgaagagtgtgaaagagctgctggggatcaccatcatggaaagaagcagcttcgagaagaatcccatcgactttctggaagccaagggctacaaagaagtgaaaaaggacctgatcatcaagctgcctaagtactccctgttcgagctggaaaacggccggaagagaatgctggcctctgccggcgaactgcagaagggaaacgaactggccctgccctccaaatatgtgaacttcctgtacctggccagccactatgagaagctgaagggctcccccgaggataatgagcagaaacagctgtttgtggaacagcacaagcactacctggacgagatcatcgagcagatcagcgagttctccaagagagtgatcctggccgacgctaatctggacaaagtgctgtccgcctacaacaagcaccgggataagcccatcagagagcaggccgagaatatcatccacctgtttaccctgaccaatctgggagcccctgccgccttcaagtactttgacaccaccatcgaccggaagaggtacaccagcaccaaagaggtgctggacgccaccctgatccaccagagcatcaccggcctgtacgagacacggatcgacctgtctcagctgggaggtgactctggcggctcaaaaagaaccgccgacggcagcgaattcgagcccaagaagaagaggaaagtctaaccggtcatcatcaccatcaccattgagtttaaacccgctgatcagcctcgactgtgccttctagttgccagccatctgttgtttgcccctcccccgtgccttccttgaccctggaaggtgccactcccactgtcctttcctaataaaatgaggaaattgcatcgcattgtctgagtaggtgtcattctattctggggggtggggtggggcaggacagcaagggggaggattgggaagacaatagcaggcatgctggggatgcggtgggctctatggcttctgaggcggaaagaaccagctggggctcgataccgtcgacctctagctagagcttggcgtaatcatggtcatagctgtttcctgtgtgaaattgttatccgctcacaattccacacaacatacgagccggaagcataaagtgtaaagcctagggtgcctaatgagtgagctaactcacattaattgcgttgcgctcactgcccgctttccagtcgggaaacctgtcgtgccagctgcattaatgaatcggccaacgcgcggggagaggcggtttgcgtattgggcgctcttccgcttcctcgctcactgactcgctgcgctcggtcgttcggctgcggcgagcggtatcagctcactcaaaggcggtaatacggttatccacagaatcaggggataacgcaggaaagaacatgtgagcaaaaggccagcaaaaggccaggaaccgtaaaaaggccgcgttgctggcgtttttccataggctccgcccccctgacgagcatcacaaaaatcgacgctcaagtcagaggtggcgaaacccgacaggactataaagataccaggcgtttccccctggaagctccctcgtgcgctctcctgttccgaccctgccgcttaccggatacctgtccgcctttctcccttcgggaagcgtggcgctttctcatagctcacgctgtaggtatctcagttcggtgtaggtcgttcgctccaagctgggctgtgtgcacgaaccccccgttcagcccgaccgctgcgccttatccggtaactatcgtcttgagtccaacccggtaagacacgacttatcgccactggcagcagccactggtaacaggattagcagagcgaggtatgtaggcggtgctacagagttcttgaagtggtggcctaactacggctacactagaagaacagtatttggtatctgcgctctgctgaagccagttaccttcggaaaaagagttggtagctcttgatccggcaaacaaaccaccgctggtagcggtggtttttttgtttgcaagcagcagattacgcgcagaaaaaaaggatctcaagaagatcctttgatcttttctacggggtctgacactcagtggaacgaaaactcacgttaagggattttggtcatgagattatcaaaaaggatcttcacctagatccttttaaattaaaaatgaagttttaaatcaatctaaagtatatatgagtaaacttggtctgacagttaccaatgcttaatcagtgaggcacctatctcagcgatctgtctatttcgttcatccatagttgcctgactccccgtcgtgtagataactacgatacgggagggcttaccatctggccccagtgctgcaatgataccgcgagacccacgctcaccggctccagatttatcagcaataaaccagccagccggaagggccgagcgcagaagtggtcctgcaactttatccgcctccatccagtctattaattgttgccgggaagctagagtaagtagttcgccagttaatagtttgcgcaacgttgttgccattgctacaggcatcgtggtgtcacgctcgtcgtttggtatggcttcattcagctccggttcccaacgatcaaggcgagttacatgatcccccatgttgtgcaaaaaagcggttagctccttcggtcctccgatcgttgtcagaagtaagttggccgcagtgttatcactcatggttatggcagcactgcataattctcttactgtcatgccatccgtaagatgcttttctgtgactggtgagtactcaaccaagtcattctgagaatagtgtatgcggcgaccgagttgctcttgcccggcgtcaatacgggataataccgcgccacatagcagaactttaaaagtgctcatcattggaaaacgttcttcggggcgaaaactctcaaggatcttaccgctgttgagatccagttcgatgtaacccactcgtgcacccaactgatcttcagcatcttttactttcaccagcgtttctgggtgagcaaaaacaggaaggcaaaatgccgcaaaaaagggaataagggcgacacggaaatgttgaatactcatactcttcctttttcaatattattgaagcatttatcagggttattgtctcatgagcggatacatatttgaatgtatttagaaaaataaacaaataggggttccgcgcacatttccccgaaaagtgccacctgacgtcgacggatcgggagatcgatctcccgatcccctagggtcgactctcagtacaatctgctctgatgccgcatagttaagccagtatctgctccctgcttgtgtgttggaggtcgctgagtagtgcgcgagcaaaatttaagctacaacaaggcaaggcttgaccgacaattgcatgaagaatctgcttagggttaggcgttttgcgctgcttcgcgatgtacgggccagatatacgcgttgacattgattattgactagttattaatagtaatcaattacggggtcattagttcatagcccatatatggagttccgcgttacataacttacggtaaatggcccgcctggctgaccgcccaacgacccccgcccattgacgtcaataatgacgtatgttcccatagtaacgccaatagggactttccattgacgtcaatgggtggagtatttacggtaaactgcccacttggcagtacatcaagtgtatc

SEQ ID NO: 42 - protein, 1367 aa, Streptococcus pyogenes
MDKKYSIGLDIGTNSVGWAVITDDYKVPSKKFKVLGNTDRHSIKKNLIGALLFGSGETAEATRLKRTARRRYTRRKNRICYLQEIFSNEMAKVDDSFFHRLEESFLVEEDKKHERHPIFGNIVDEVAYHEKYPTIYHLRKKLADSTDKADLRLIYLALAHMIKFRGHFLIEGDLNPDNSDVDKLFIQLVQIYNQLFEENPINASRVDAKAILSARLSKSRRLENLIAQLPGEKRNGLFGNLIALSLGLTPNFKSNFDLAEDAKLQLSKDTYDDDLDNLLAQIGDQYADLFLAAKNLSDAILLSDILRVNSEITKAPLSASMIKRYDEHHQDLTLLKALVRQQLPEKYKEIFFDQSKNGYAGYIDGGASQEEFYKFIKPILEKMDGTEELLVKLNREDLLRKQRTFDNGSIPHQIHLGELHAILRRQEDFYPFLKDNREKIEKILTFRIPYYVGPLARGNSRFAWMTRKSEETITPWNFEEVVDKGASAQSFIERMTNFDKNLPNEKVLPKHSLLYEYFTVYNELTKVKYVTEGMRKPAFLSGEQKKAIVDLLFKTNRKVTVKQLKEDYFKKIECFDSVEISGVEDRFNASLGAYHDLLKIIKDKDFLDNEENEDILEDIVLTLTLFEDRGMIEERLKTYAHLFDDKVMKQLKRRRYTGWGRLSRKLINGIRDKQSGKTILDFLKSDGFANRNFMQLIHDDSLTFKEDIQKAQVSGQGHSLHEQIANLAGSPAIKKGILQTVKIVDELVKVMGHKPENIVIEMARENQTTQKGQKNSRERMKRIEEGIKELGSQILKEHPVENTQLQNEKLYLYYLQNGRDMYVDQELDINRLSDYDVDHIVPQSFIKDDSIDNKVLTRSDKNRGKSDNVPSEEVVKKMKNYWRQLLNAKLITQRKFDNLTKAERGGLSELDKAGFIKRQLVETRQITKHVAQILDSRMNTKYDENDKLIREVKVITLKSKLVSDFRKDFQFYKVREINNYHHAHDAYLNAVVGTALIKKYPKLESEFVYGDYKVYDVRKMIAKSEQEIGKATAKYFFYSNIMNFFKTEITLANGEIRKRPLIETNGETGEIVWDKGRDFATVRKVLSMPQVNIVKKTEVQTGGFSKESILPKRNSDKLIARKKDWDPKKYGGFDSPTVAYSVLVVAKVEKGKSKKLKSVKELLGITIMERSSFEKNPIDFLEAKGYKEVKKDLIIKLPKYSLFELENGRKRMLASAGELQKGNELALPSKYVNFLYLASHYEKLKGSPEDNEQKQLFVEQHKHYLDEIIEQISEFSKRVILADANLDKVLSAYNKHRDKPIREQAENIIHLFTLTNLGAPAAFKYFDTTIDRKRYTSTKEVLDATLIHQSITGLYETRIDLSQLGGD

SEQ ID NO: 43 - DNA, 4104 bp, Streptococcus pyogenes
atggataagaaatactcaataggcttagatatcggcacaaatagcgtcggatgggcggtgatcactgatgattataaggttccgtctaaaaagttcaaggttctgggaaatacagaccgccacagtatcaaaaaaaatcttataggggctcttttatttggcagtggagagacagcggaagcgactcgtctcaaacggacagctcgtagaaggtatacacgtcggaagaatcgtatttgttatctacaggagattttttcaaatgagatggcgaaagtagatgatagtttctttcatcgacttgaagagtcttttttggtggaagaagacaagaagcatgaacgtcatcctatttttggaaatatagtagatgaagttgcttatcatgagaaatatccaactatctatcatctgcgaaaaaaattggcagattctactgataaagcggatttgcgcttaatctatttggccttagcgcatatgattaagtttcgtggtcattttttgattgagggagatttaaatcctgataatagtgatgtggacaaactatttatccagttggtacaaatctacaatcaattatttgaagaaaaccctattaacgcaagtagagtagatgctaaagcgattctttctgcacgattgagtaaatcaagacgattagaaaatctcattgctcagctccccggtgagaagagaaatggcttgtttgggaatctcattgctttgtcattgggattgacccctaattttaaatcaaattttgatttggcagaagatgctaaattacagctttcaaaagatacttacgatgatgatttagataatttattggcgcaaattggagatcaatatgctgatttgtttttggcagctaagaatttatcagatgctattttactttcagatatcctaagagtaaatagtgaaataactaaggctcccctatcagcttcaatgattaagcgctacgatgaacatcatcaagacttgactcttttaaaagctttagttcgacaacaacttccagaaaagtataaagaaatcttttttgatcaatcaaaaaacggatatgcaggttatattgatgggggagctagccaagaagaattttataaatttatcaaaccaattttagaaaaaatggatggtactgaggaattattggtgaaactaaatcgtgaagatttgctgcgcaagcaacggacctttgacaacggctctattccccatcaaattcacttgggtgagctgcatgctattttgagaagacaagaagacttttatccatttttaaaagacaatcgtgagaagattgaaaaaatcttgacttttcgaattccttattatgttggtccattggcgcgtggcaatagtcgttttgcatggatgactcggaagtctgaagaaacaattaccccatggaattttgaagaagttgtcgataaaggtgcttcagctcaatcatttattgaacgcatgacaaactttgataaaaatcttccaaatgaaaaagtactaccaaaacatagtttgctttatgagtattttacggtttataacgaattgacaaaggtcaaatatgttactgagggaatgcgaaaaccagcatttctttcaggtgaacagaagaaagccattgttgatttactcttcaaaacaaatcgaaaagtaaccgttaagcaattaaaagaagattatttcaaaaaaatagaatgttttgatagtgttgaaatttcaggagttgaagatagatttaatgcttcattaggcgcctaccatgatttgctaaaaattattaaagataaagattttttggataatgaagaaaatgaagatatcttagaggatattgttttaacattgaccttatttgaagatagggggatgattgaggaaagacttaaaacatatgctcacctctttgatgataaggtgatgaaacagcttaaacgtcgccgttatactggttggggacgtttgtctcgaaaattgattaatggtattagggataagcaatctggcaaaacaatattagattttttgaaatcagatggttttgccaatcgcaattttatgcagctgatccatgatgatagtttgacatttaaagaagatattcaaaaagcacaggtgtctggacaaggccatagtttacatgaacagattgctaacttagctggcagtcctgctattaaaaaaggtattttacagactgtaaaaattgttgatgaactggtcaaagtaatggggcataagccagaaaatatcgttattgaaatggcacgtgaaaatcagacaactcaaaagggccagaaaaattcgcgagagcgtatgaaacgaatcgaagaaggtatcaaagaattaggaagtcagattcttaaagagcatcctgttgaaaatactcaattgcaaaatgaaaagctctatctctattatctacaaaatggaagagacatgtatgtggaccaagaattagatattaatcgtttaagtgattatgatgtcgatcacattgttccacaaagtttcattaaagacgattcaatagacaataaggtactaacgcgttctgataaaaatcgtggtaaatcggataacgttccaagtgaagaagtagtcaaaaagatgaaaaactattggagacaacttctaaacgccaagttaatcactcaacgtaagtttgataatttaacgaaagctgaacgtggaggtttgagtgaacttgataaagctggttttatcaaacgccaattggttgaaactcgccaaatcactaagcatgtggcacaaattttggatagtcgcatgaatactaaatacgatgaaaatgataaacttattcgagaggttaaagtgattaccttaaaatctaaattagtttctgacttccgaaaagatttccaattctataaagtacgtgagattaacaattaccatcatgcccatgatgcgtatctaaatgccgtcgttggaactgctttgattaagaaatatccaaaacttgaatcggagtttgtctatggtgattataaagtttatgatgttcgtaaaatgattgctaagtctgagcaagaaataggcaaagcaaccgcaaaatatttcttttactctaatatcatgaacttcttcaaaacagaaattacacttgcaaatggagagattcgcaaacgccctctaatcgaaactaatggggaaactggagaaattgtctgggataaagggcgagattttgccacagtgcgcaaagtattgtccatgccccaagtcaatattgtcaagaaaacagaagtacagacaggcggattctccaaggagtcaattttaccaaaaagaaattcggacaagcttattgctcgtaaaaaagactgggatccaaaaaaatatggtggttttgatagtccaacggtagcttattcagtcctagtggttgctaaggtggaaaaagggaaatcgaagaagttaaaatccgttaaagagttactagggatcacaattatggaaagaagttcctttgaaaaaaatccgattgactttttagaagctaaaggatataaggaagttaaaaaagacttaatcattaaactacctaaatatagtctttttgagttagaaaacggtcgtaaacggatgctggctagtgccggagaattacaaaaaggaaatgagctggctctgccaagcaaatatgtgaattttttatatttagctagtcattatgaaaagttgaagggtagtccagaagataacgaacaaaaacaattgtttgtggagcagcataagcattatttagatgagattattgagcaaatcagtgaattttctaagcgtgttattttagcagatgccaatttagataaagttcttagtgcatataacaaacatagagacaaaccaatacgtgaacaagcagaaaatattattcatttatttacgttgacgaatcttggagctcccgctgcttttaaatattttgatacaacaattgatcgtaaacgatatacgtctacaaaagaagttttagatgccactcttatccatcaatccatcactggtctttatgaaacacgcattgatttgagtcagctaggaggtgactga

SEQ ID NO: 44 - DNA, 4212 bp, Streptococcus pyogenes
atggataaaaagtattctattggtttagacatcggcactaattccgttggatgggctgtcataaccgatgaatacaaagtaccttcaaagaaatttaaggtgttggggaacacagaccgtcattcgattaaaaagaatcttatcggtgccctcctattcgatagtggcgaaacggcagaggcgactcgcctgaaacgaaccgctcggagaaggtatacacgtcgcaagaaccgaatatgttacttacaagaaatttttagcaatgagatggccaaagttgacgattctttctttcaccgtttggaagagtccttccttgtcgaagaggacaagaaacatgaacggcaccccatctttggaaacatagtagatgaggtggcatatcatgaaaagtacccaacgatttatcacctcagaaaaaagctagttgactcaactgataaagcggacctgaggttaatctacttggctcttgcccatatgataaagttccgtgggcactttctcattgagggtgatctaaatccggacaactcggatgtcgacaaactgttcatccagttagtacaaacctataatcagttgtttgaagagaaccctataaatgcaagtggcgtggatgcgaaggctattcttagcgcccgcctctctaaatcccgacggctagaaaacctgatcgcacaattacccggagagaagaaaaatgggttgttcggtaaccttatagcgctctcactaggcctgacaccaaattttaagtcgaacttcgacttagctgaagatgccaaattgcagcttagtaaggacacgtacgatgacgatctcgacaatctactggcacaaattggagatcagtatgcggacttatttttggctgccaaaaaccttagcgatgcaatcctcctatctgacatactgagagttaatactgagattaccaaggcgccgttatccgcttcaatgatcaaaaggtacgatgaacatcaccaagacttgacacttctcaaggccctagtccgtcagcaactgcctgagaaatataaggaaatattctttgatcagtcgaaaaacgggtacgcaggttatattgacggcggagcgagtcaagaggaattctacaagtttatcaaacccatattagagaagatggatgggacggaagagttgcttgtaaaactcaatcgcgaagatctactgcgaaagcagcggactttcgacaacggtagcattccacatcaaatccacttaggcgaattgcatgctatacttagaaggcaggaggatttttatccgttcctcaaagacaatcgtgaaaagattgagaaaatcctaacctttcgcataccttactatgtgggacccctggcccgagggaactctcggttcgcatggatgacaagaaagtccgaagaaacgattactccatggaattttgaggaagttgtcgataaaggtgcgtcagctcaatcgttcatcgagaggatgaccaactttgacaagaatttaccgaacgaaaaagtattgcctaagcacagtttactttacgagtatttcacagtgtacaatgaactcacgaaagttaagtatgtcactgagggcatgcgtaaacccgcctttctaagcggagaacagaagaaagcaatagtagatctgttattcaagaccaaccgcaaagtgacagttaagcaattgaaagaggactactttaagaaaattgaatgcttcgattctgtcgagatctccggggtagaagatcgatttaatgcgtcacttggtacgtatcatgacctcctaaagataattaaagataaggacttcctggataacgaagagaatgaagatatcttagaagatatagtgttgactcttaccctctttgaagatcgggaaatgattgaggaaagactaaaaacatacgctcacctgttcgacgataaggttatgaaacagttaaagaggcgtcgctatacgggctggggacgattgtcgcggaaacttatcaacgggataagagacaagcaaagtggtaaaactattctcgattttctaaagagcgacggcttcgccaataggaactttatgcagctgatccatgatgactctttaaccttcaaagaggatatacaaaaggcacaggtttccggacaaggggactcattgcacgaacatattgcgaatcttgctggttcgccagccatcaaaaagggcatactccagacagtcaaagtagtggatgagctagttaaggtcatgggacgtcacaaaccggaaaacattgtaatcgagatggcacgcgaaaatcaaacgactcagaaggggcaaaaaaacagtcgagagcggatgaagagaatagaagagggtattaaagaactgggcagccagatcttaaaggagcatcctgtggaaaatacccaattgcagaacgagaaactttacctctattacctacaaaatggaagggacatgtatgttgatcaggaactggacataaaccgtttatctgattacgacgtcgatcacattgtaccccaatcctttttgaaggacgattcaatcgacaataaagtgcttacacgctcggataagaaccgagggaaaagtgacaatgttccaagcgaggaagtcgtaaagaaaatgaagaactattggcggcagctcctaaatgcgaaactgataacgcaaagaaagttcgataacttaactaaagctgagaggggtggcttgtctgaacttgacaaggccggatttattaaacgtcagctcgtggaaacccgccaaatcacaaagcatgttgcacagatactagattcccgaatgaatacgaaatacgacgagaacgataagctgattcgggaagtcaaagtaatcactttaaagtcaaaattggtgtcggacttcagaaaggattttcaattctataaagttagggagataaataactaccaccatgcgcacgacgcttatcttaatgccgtcgtagggaccgcactcattaagaaatacccgaagctagaaagtgagtttgtgtatggtgattacaaagtttatgacgtccgtaagatgatcgcgaaaagcgaacaggagataggcaaggctacagccaaatacttcttttattctaacattatgaatttctttaagacggaaatcactctggcaaacggagagatacgcaaacgacctttaattgaaaccaatggggagacaggtgaaatcgtatgggataagggccgggacttcgcgacggtgagaaaagttttgtccatgccccaagtcaacatagtaaagaaaactgaggtgcagaccggagggttttcaaaggaatcgattcttccaaaaaggaatagtgataagctcatcgctcgtaaaaaggactgggacccgaaaaagtacggtggcttcgatagccctacagttgcctattctgtcctagtagtggcaaaagttgagaagggaaaatccaagaaactgaagtcagtcaaagaattattggggataacgattatggagcgctcgtcttttgaaaagaaccccatcgacttccttgaggcgaaaggttacaaggaagtaaaaaaggatctcataattaaactaccaaagtatagtctgtttgagttagaaaatggccgaaaacggatgttggctagcgccggagagcttcaaaaggggaacgaactcgcactaccgtctaaatacgtgaatttcctgtatttagcgtcccattacgagaagttgaaaggttcacctgaagataacgaacagaagcaactttttgttgagcagcacaaacattatctcgacgaaatcatagagcaaatttcggaattcagtaagagagtcatcctagctgatgccaatctggacaaagtattaagcgcatacaacaagcacagggataaacccatacgtgagcaggcggaaaatattatccatttgtttactcttaccaacctcggcgctccagccgcattcaagtattttgacacaacgatagatcgcaaacgatacacttctaccaaggaggtgctagacgcgacactgattcaccaatccatcacgggattatatgaaactcggatagatttgtcacagcttgggggtgacggatcccccaagaagaagaggaaagtctcgagcgactacaaagaccatgacggtgattataaagatcatgacatcgattacaaggatgacgatgacaaggctgcagga

SEQ ID NO: 45 - DNA, 4107 bp, Streptococcus pyogenes
atggataagaaatactcaataggcttagatatcggcacaaatagcgtcggatgggcggtgatcactgatgaatataaggttccgtctaaaaagttcaaggttctgggaaatacagaccgccacagtatcaaaaaaaatcttataggggctcttttatttgacagtggagagacagcggaagcgactcgtctcaaacggacagctcgtagaaggtatacacgtcggaagaatcgtatttgttatctacaggagattttttcaaatgagatggcgaaagtagatgatagtttctttcatcgacttgaagagtcttttttggtggaagaagacaagaagcatgaacgtcatcctatttttggaaatatagtagatgaagttgcttatcatgagaaatatccaactatctatcatctgcgaaaaaaattggtagattctactgataaagcggatttgcgcttaatctatttggccttagcgcatatgattaagtttcgtggtcattttttgattgagggagatttaaatcctgataatagtgatgtggacaaactatttatccagttggtacaaacctacaatcaattatttgaagaaaaccctattaacgcaagtggagtagatgctaaagcgattctttctgcacgattgagtaaatcaagacgattagaaaatctcattgctcagctccccggtgagaagaaaaatggcttatttgggaatctcattgctttgtcattgggtttgacccctaattttaaatcaaattttgatttggcagaagatgctaaattacagctttcaaaagatacttacgatgatgatttagataatttattggcgcaaattggagatcaatatgctgatttgtttttggcagctaagaatttatcagatgctattttactttcagatatcctaagagtaaatactgaaataactaaggctcccctatcagcttcaatgattaaacgctacgatgaacatcatcaagacttgactcttttaaaagctttagttcgacaacaacttccagaaaagtataaagaaatcttttttgatcaatcaaaaaacggatatgcaggttatattgatgggggagctagccaagaagaattttataaatttatcaaaccaattttagaaaaaatggatggtactgaggaattattggtgaaactaaatcgtgaagatttgctgcgcaagcaacggacctttgacaacggctctattccccatcaaattcacttgggtgagctgcatgctattttgagaagacaagaagacttttatccatttttaaaagacaatcgtgagaagattgaaaaaatcttgacttttcgaattccttattatgttggtccattggcgcgtggcaatagtcgttttgcatggatgactcggaagtctgaagaaacaattaccccatggaattttgaagaagttgtcgataaaggtgcttcagctcaatcatttattgaacgcatgacaaactttgataaaaatcttccaaatgaaaaagtactaccaaaacatagtttgctttatgagtattttacggtttataacgaattgacaaaggtcaaatatgttactgaaggaatgcgaaaaccagcatttctttcaggtgaacagaagaaagccattgttgatttactcttcaaaacaaatcgaaaagtaaccgttaagcaattaaaagaagattatttcaaaaaaatagaatgttttgatagtgttgaaatttcaggagttgaagatagatttaatgcttcattaggtacctaccatgatttgctaaaaattattaaagataaagattttttggataatgaagaaaatgaagatatcttagaggatattgttttaacattgaccttatttgaagatagggagatgattgaggaaagacttaaaacatatgctcacctctttgatgataaggtgatgaaacagcttaaacgtcgccgttatactggttggggacgtttgtctcgaaaattgattaatggtattagggataagcaatctggcaaaacaatattagattttttgaaatcagatggttttgccaatcgcaattttatgcagctgatccatgatgatagtttgacatttaaagaagacattcaaaaagcacaagtgtctggacaaggcgatagtttacatgaacatattgcaaatttagctggtagccctgctattaaaaaaggtattttacagactgtaaaagttgttgatgaattggtcaaagtaatggggcggcataagccagaaaatatcgttattgaaatggcacgtgaaaatcagacaactcaaaagggccagaaaaattcgcgagagcgtatgaaacgaatcgaagaaggtatcaaagaattaggaagtcagattcttaaagagcatcctgttgaaaatactcaattgcaaaatgaaaagctctatctctattatctccaaaatggaagagacatgtatgtggaccaagaattagatattaatcgtttaagtgattatgatgtcgatcacattgttccacaaagtttccttaaagacgattcaatagacaataaggtcttaacgcgttctgataaaaatcgtggtaaatcggataacgttccaagtgaagaagtagtcaaaaagatgaaaaactattggagacaacttctaaacgccaagttaatcactcaacgtaagtttgataatttaacgaaagctgaacgtggaggtttgagtgaacttgataaagctggttttatcaaacgccaattggttgaaactcgccaaatcactaagcatgtggcacaaattttggatagtcgcatgaatactaaatacgatgaaaatgataaacttattcgagaggttaaagtgattaccttaaaatctaaattagtttctgacttccgaaaagatttccaattctataaagtacgtgagattaacaattaccatcatgcccatgatgcgtatctaaatgccgtcgttggaactgctttgattaagaaatatccaaaacttgaatcggagtttgtctatggtgattataaagtttatgatgttcgtaaaatgattgctaagtctgagcaagaaataggcaaagcaaccgcaaaatatttcttttactctaatatcatgaacttcttcaaaacagaaattacacttgcaaatggagagattcgcaaacgccctctaatcgaaactaatggggaaactggagaaattgtctgggataaagggcgagattttgccacagtgcgcaaagtattgtccatgccccaagtcaatattgtcaagaaaacagaagtacagacaggcggattctccaaggagtcaattttaccaaaaagaaattcggacaagcttattgctcgtaaaaaagactgggatccaaaaaaatatggtggttttgatagtccaacggtagcttattcagtcctagtggttgctaaggtggaaaaagggaaatcgaagaagttaaaatccgttaaagagttactagggatcacaattatggaaagaagttcctttgaaaaaaatccgattgactttttagaagctaaaggatataaggaagttaaaaaagacttaatcattaaactacctaaatatagtctttttgagttagaaaacggtcgtaaacggatgctggctagtgccggagaattacaaaaaggaaatgagctggctctgccaagcaaatatgtgaattttttatatttagctagtcattatgaaaagttgaagggtagtccagaagataacgaacaaaaacaattgtttgtggagcagcataagcattatttagatgagattattgagcaaatcagtgaattttctaagcgtgttattttagcagatgccaatttagataaagttcttagtgcatataacaaacatagagacaaaccaatacgtgaacaagcagaaaatattattcatttatttacgttgacgaatcttggagctcccgctgcttttaaatattttgatacaacaattgatcgtaaacgatatacgtctacaaaagaagttttagatgccactcttatccatcaatccatcactggtctttatgaaacacgcattgatttgagtcagctaggaggtgactga

SEQ ID NO: 46 - protein, 1368 aa, Artificial Sequence
  Description of Artificial Sequence: Synthetic polypeptide
MDKKYSIGLAIGTNSVGWAVITDEYKVPSKKFKVLGNTDRHSIKKNLIGALLFDSGETAEATRLKRTARRRYTRRKNRICYLQEIFSNEMAKVDDSFFHRLEESFLVEEDKKHERHPIFGNIVDEVAYHEKYPTIYHLRKKLVDSTDKADLRLIYLALAHMIKFRGHFLIEGDLNPDNSDVDKLFIQLVQTYNQLFEENPINASGVDAKAILSARLSKSRRLENLIAQLPGEKKNGLFGNLIALSLGLTPNFKSNFDLAEDAKLQLSKDTYDDDLDNLLAQIGDQYADLFLAAKNLSDAILLSDILRVNTEITKAPLSASMIKRYDEHHQDLTLLKALVRQQLPEKYKEIFFDQSKNGYAGYIDGGASQEEFYKFIKPILEKMDGTEELLVKLNREDLLRKQRTFDNGSIPHQIHLGELHAILRRQEDFYPFLKDNREKIEKILTFRIPYYVGPLARGNSRFAWMTRKSEETITPWNFEEVVDKGASAQSFIERMTNFDKNLPNEKVLPKHSLLYEYFTVYNELTKVKYVTEGMRKPAFLSGEQKKAIVDLLFKTNRKVTVKQLKEDYFKKIECFDSVEISGVEDRFNASLGTYHDLLKIIKDKDFLDNEENEDILEDIVLTLTLFEDREMIEERLKTYAHLFDDKVMKQLKRRRYTGWGRLSRKLINGIRDKQSGKTILDFLKSDGFANRNFMQLIHDDSLTFKEDIQKAQVSGQGDSLHEHIANLAGSPAIKKGILQTVKVVDELVKVMGRHKPENIVIEMARENQTTQKGQKNSRERMKRIEEGIKELGSQILKEHPVENTQLQNEKLYLYYLQNGRDMYVDQELDINRLSDYDVDAIVPQSFLKDDSIDNKVLTRSDKNRGKSDNVPSEEVVKKMKNYWRQLLNAKLITQRKFDNLTKAERGGLSELDKAGFIKRQLVETRQITKHVAQILDSRMNTKYDENDKLIREVKVITLKSKLVSDFRKDFQFYKVREINNYHHAHDAYLNAVVGTALIKKYPKLESEFVYGDYKVYDVRKMIAKSEQEIGKATAKYFFYSNIMNFFKTEITLANGEIRKRPLIETNGETGEIVWDKGRDFATVRKVLSMPQVNIVKKTEVQTGGFSKESILPKRNSDKLIARKKDWDPKKYGGFDSPTVAYSVLVVAKVEKGKSKKLKSVKELLGITIMERSSFEKNPIDFLEAKGYKEVKKDLIIKLPKYSLFELENGRKRMLASAGELQKGNELALPSKYVNFLYLASHYEKLKGSPEDNEQKQLFVEQHKHYLDEIIEQISEFSKRVILADANLDKVLSAYNKHRDKPIREQAENIIHLFTLTNLGAPAAFKYFDTTIDRKRYTSTKEVLDATLIHQSITGLYETRIDLSQLGGD

SEQ ID NO: 47 - protein, 1367 aa, Artificial Sequence
  Description of Artificial Sequence: Synthetic polypeptide
DKKYSIGLAIGTNSVGWAVITDEYKVPSKKFKVLGNTDRHSIKKNLIGALLFDSGETAEATRLKRTARRRYTRRKNRICYLQEIFSNEMAKVDDSFFHRLEESFLVEEDKKHERHPIFGNIVDEVAYHEKYPTIYHLRKKLVDSTDKADLRLIYLALAHMIKFRGHFLIEGDLNPDNSDVDKLFIQLVQTYNQLFEENPINASGVDAKAILSARLSKSRRLENLIAQLPGEKKNGLFGNLIALSLGLTPNFKSNFDLAEDAKLQLSKDTYDDDLDNLLAQIGDQYADLFLAAKNLSDAILLSDILRVNTEITKAPLSASMIKRYDEHHQDLTLLKALVRQQLPEKYKEIFFDQSKNGYAGYIDGGASQEEFYKFIKPILEKMDGTEELLVKLNREDLLRKQRTFDNGSIPHQIHLGELHAILRRQEDFYPFLKDNREKIEKILTFRIPYYVGPLARGNSRFAWMTRKSEETITPWNFEEVVDKGASAQSFIERMTNFDKNLPNEKVLPKHSLLYEYFTVYNELTKVKYVTEGMRKPAFLSGEQKKAIVDLLFKTNRKVTVKQLKEDYFKKIECFDSVEISGVEDRFNASLGTYHDLLKIIKDKDFLDNEENEDILEDIVLTLTLFEDREMIEERLKTYAHLFDDKVMKQLKRRRYTGWGRLSRKLINGIRDKQSGKTILDFLKSDGFANRNFMQLIHDDSLTFKEDIQKAQVSGQGDSLHEHIANLAGSPAIKKGILQTVKVVDELVKVMGRHKPENIVIEMARENQTTQKGQKNSRERMKRIEEGIKELGSQILKEHPVENTQLQNEKLYLYYLQNGRDMYVDQELDINRLSDYDVDAIVPQSFLKDDSIDNKVLTRSDKNRGKSDNVPSEEVVKKMKNYWRQLLNAKLITQRKFDNLTKAERGGLSELDKAGFIKRQLVETRQITKHVAQILDSRMNTKYDENDKLIREVKVITLKSKLVSDFRKDFQFYKVREINNYHHAHDAYLNAVVGTALIKKYPKLESEFVYGDYKVYDVRKMIAKSEQEIGKATAKYFFYSNIMNFFKTEITLANGEIRKRPLIETNGETGEIVWDKGRDFATVRKVLSMPQVNIVKKTEVQTGGFSKESILPKRNSDKLIARKKDWDPKKYGGFDSPTVAYSVLVVAKVEKGKSKKLKSVKELLGITIMERSSFEKNPIDFLEAKGYKEVKKDLIIKLPKYSLFELENGRKRMLASAGELQKGNELALPSKYVNFLYLASHYEKLKGSPEDNEQKQLFVEQHKHYLDEIIEQISEFSKRVILADANLDKVLSAYNKHRDKPIREQAENIIHLFTLTNLGAPAAFKYFDTTIDRKRYTSTKEVLDATLIHQSITGLYETRIDLSQLGGD

SEQ ID NO: 48 - protein, 1367 aa, Artificial Sequence
  Description of Artificial Sequence: Synthetic polypeptide
DKKYSIGLAIGTNSVGWAVITDEYKVPSKKFKVLGNTDRHSIKKNLIGALLFDSGETAEATRLKRTARRRYTRRKNRICYLQEIFSNEMAKVDDSFFHRLEESFLVEEDKKHERHPIFGNIVDEVAYHEKYPTIYHLRKKLVDSTDKADLRLIYLALAHMIKFRGHFLIEGDLNPDNSDVDKLFIQLVQTYNQLFEENPINASGVDAKAILSARLSKSRRLENLIAQLPGEKKNGLFGNLIALSLGLTPNFKSNFDLAEDAKLQLSKDTYDDDLDNLLAQIGDQYADLFLAAKNLSDAILLSDILRVNTEITKAPLSASMIKRYDEHHQDLTLLKALVRQQLPEKYKEIFFDQSKNGYAGYIDGGASQEEFYKFIKPILEKMDGTEELLVKLNREDLLRKQRTFDNGSIPHQIHLGELHAILRRQEDFYPFLKDNREKIEKILTFRIPYYVGPLARGNSRFAWMTRKSEETITPWNFEEVVDKGASAQSFIERMTNFDKNLPNEKVLPKHSLLYEYFTVYNELTKVKYVTEGMRKPAFLSGEQKKAIVDLLFKTNRKVTVKQLKEDYFKKIECFDSVEISGVEDRFNASLGTYHDLLKIIKDKDFLDNEENEDILEDIVLTLTLFEDREMIEERLKTYAHLFDDKVMKQLKRRRYTGWGRLSRKLINGIRDKQSGKTILDFLKSDGFANRNFMQLIHDDSLTFKEDIQKAQVSGQGDSLHEHIANLAGSPAIKKGILQTVKVVDELVKVMGRHKPENIVIEMARENQTTQKGQKNSRERMKRIEEGIKELGSQILKEHPVENTQLQNEKLYLYYLQNGRDMYVDQELDINRLSDYDVDHIVPQSFLKDDSIDNKVLTRSDKNRGKSDNVPSEEVVKKMKNYWRQLLNAKLITQRKFDNLTKAERGGLSELDKAGFIKRQLVETRQITKHVAQILDSRMNTKYDENDKLIREVKVITLKSKLVSDFRKDFQFYKVREINNYHHAHDAYLNAVVGTALIKKYPKLESEFVYGDYKVYDVRKMIAKSEQEIGKATAKYFFYSNIMNFFKTEITLANGEIRKRPLIETNGETGEIVWDKGRDFATVRKVLSMPQVNIVKKTEVQTGGFSKESILPKRNSDKLIARKKDWDPKKYGGFDSPTVAYSVLVVAKVEKGKSKKLKSVKELLGITIMERSSFEKNPIDFLEAKGYKEVKKDLIIKLPKYSLFELENGRKRMLASAGELQKGNELALPSKYVNFLYLASHYEKLKGSPEDNEQKQLFVEQHKHYLDEIIEQISEFSKRVILADANLDKVLSAYNKHRDKPIREQAENIIHLFTLTNLGAPAAFKYFDTTIDRKRYTSTKEVLDATLIHQSITGLYETRIDLSQLGGD

SEQ ID NO: 49 - protein, 1367 aa, Streptococcus pyogenes
DKKYSIGLDIGTNSVGWAVITDEYKVPSKKFKVLGNTDRHSIKKNLIGALLFDSGETAEATRLKRTARRRYTRRKNRICYLQEIFSNEMAKVDDSFFHRLEESFLVEEDKKHERHPIFGNIVDEVAYHEKYPTIYHLRKKLVDSTDKADLRLIYLALAHMIKFRGHFLIEGDLNPDNSDVDKLFIQLVQTYNQLFEENPINASGVDAKAILSARLSKSRRLENLIAQLPGEKKNGLFGNLIALSLGLTPNFKSNFDLAEDAKLQLSKDTYDDDLDNLLAQIGDQYADLFLAAKNLSDAILLSDILRVNTEITKAPLSASMIKRYDEHHQDLTLLKALVRQQLPEKYKEIFFDQSKNGYAGYIDGGASQEEFYKFIKPILEKMDGTEELLVKLNREDLLRKQRTFDNGSIPHQIHLGELHAILRRQEDFYPFLKDNREKIEKILTFRIPYYVGPLARGNSRFAWMTRKSEETITPWNFEEVVDKGASAQSFIERMTNFDKNLPNEKVLPKHSLLYEYFTVYNELTKVKYVTEGMRKPAFLSGEQKKAIVDLLFKTNRKVTVKQLKEDYFKKIECFDSVEISGVEDRFNASLGTYHDLLKIIKDKDFLDNEENEDILEDIVLTLTLFEDREMIEERLKTYAHLFDDKVMKQLKRRRYTGWGRLSRKLINGIRDKQSGKTILDFLKSDGFANRNFMQLIHDDSLTFKEDIQKAQVSGQGDSLHEHIANLAGSPAIKKGILQTVKVVDELVKVMGRHKPENIVIEMARENQTTQKGQKNSRERMKRIEEGIKELGSQILKEHPVENTQLQNEKLYLYYLQNGRDMYVDQELDINRLSDYDVDHIVPQSFLKDDSIDNKVLTRSDKNRGKSDNVPSEEVVKKMKNYWRQLLNAKLITQRKFDNLTKAERGGLSELDKAGFIKRQLVETRQITKHVAQILDSRMNTKYDENDKLIREVKVITLKSKLVSDFRKDFQFYKVREINNYHHAHDAYLNAVVGTALIKKYPKLESEFVYGDYKVYDVRKMIAKSEQEIGKATAKYFFYSNIMNFFKTEITLANGEIRKRPLIETNGETGEIVWDKGRDFATVRKVLSMPQVNIVKKTEVQTGGFSKESILPKRNSDKLIARKKDWDPKKYGGFDSPTVAYSVLVVAKVEKGKSKKLKSVKELLGITIMERSSFEKNPIDFLEAKGYKEVKKDLIIKLPKYSLFELENGRKRMLASAGELQKGNELALPSKYVNFLYLASHYEKLKGSPEDNEQKQLFVEQHKHYLDEIIEQISEFSKRVILADANLDKVLSAYNKHRDKPIREQAENIIHLFTLTNLGAPAAFKYFDTTIDRKRYTSTKEVLDATLIHQSITGLYETRIDLSQLGGD

SEQ ID NO: 50 - protein, 1129 aa, Alicyclobacillus acidoterrestris
MAVKSIKVKLRLDDMPEIRAGLWKLHKEVNAGVRYYTEWLSLLRQENLYRRSPNGDGEQECDKTAEECKAELLERLRARQVENGHRGPAGSDDELLQLARQLYELLVPQAIGAKGDAQQIARKFLSPLADKDAVGGLGIAKAGNKPRWVRMREAGEPGWEEEKEKAETRKSADRTADVLRALADFGLKPLMRVYTDSEMSSVEWKPLRKGQAVRTWDRDMFQQAIERMMSWESWNQRVGQEYAKLVEQKNRFEQKNFVGQEHLVHLVNQLQQDMKEASPGLESKEQTAHYVTGRALRGSDKVFEKWGKLAPDAPFDLYDAEIKNVQRRNTRRFGSHDLFAKLAEPEYQALWREDASFLTRYAVYNSILRKLNHAKMFATFTLPDATAHPIWTRFDKLGGNLHQYTFLFNEFGERRHAIRFHKLLKVENGVAREVDDVTVPISMSEQLDNLLPRDPNEPIALYFRDYGAEQHFTGEFGGAKIQCRRDQLAHMHRRRGARDVYLNVSVRVQSQSEARGERRPPYAAVFRLVGDNHRAFVHFDKLSDYLAEHPDDGKLGSEGLLSGLRVMSVDLGLRTSASISVFRVARKDELKPNSKGRVPFFFPIKGNDNLVAVHERSQLLKLPGETESKDLRAIREERQRTLRQLRTQLAYLRLLVRCGSEDVGRRERSWAKLIEQPVDAANHMTPDWREAFENELQKLKSLHGICSDKEWMDAVYESVRRVWRHMGKQVRDWRKDVRSGERPKIRGYAKDVVGGNSIEQIEYLERQYKFLKSWSFFGKVSGQVIRAEKGSRFAITLREHIDHAKEDRLKKLADRIIMEALGYVYALDERGKGKWVAKYPPCQLILLEELSEYQFNNDRPPSENNQLMQWSHRGVFQELINQAQVHDLLVGTMYAAFSSRFDARTGAPGIRCRRVPARCTQEHNPEPFPWWLNKFVVEHTLDACPLRADDLIPTGEGEIFVSPFSAEEGDFHQIHADLNAAQNLQQRLWSDFDISQIRLRCDWGEVDGELVLIPRLTGKRTADSYSNKVFYTNTGVTYYERERGKKRRKVFAQEKLSEEEAELLVEADEAREKSVVLMRDPSGIINRGNWTRQKEFWSMVNQRIEGYLVKQIRSRVPLQDSACENTGDI

SEQ ID NO: 51 - protein, 345 aa, Sulfolobus islandicus
MEVPLYNIFGDNYIIQVATEAENSTIYNNKVEIDDEELRNVLNLAYKIAKNNEDAAAERRGKAKKKKGEEGETTTSNIILPLSGNDKNPWTETLKCYNFPTTVALSEVFKNFSQVKECEEVSAPSFVKPEFYEFGRSPGMVERTRRVKLEVEPHYLIIAAAGWVLTRLGKAKVSEGDYVGVNVFTPTRGILYSLIQNVNGIVPGIKPETAFGLWIARKVVSSVTNPNVSVVRIYTISDAVGQNPTTINGGFSIDLTKLLEKRYLLSERLEAIARNALSISSNMRERYIVLANYIYEYLTGSKRLEDLLYFANRDLIMNLNSDDGKVRDLKLISAYVNGELIRGEG

SEQ ID NO: 52 - protein, 345 aa, Sulfolobus islandicus
MEVPLYNIFGDNYIIQVATEAENSTIYNNKVEIDDEELRNVLNLAYKIAKNNEDAAAERRGKAKKKKGEEGETTTSNIILPLSGNDKNPWTETLKCYNFPTTVALSEVFKNFSQVKECEEVSAPSFVKPEFYKFGRSPGMVERTRRVKLEVEPHYLIMAAAGWVLTRLGKAKVSEGDYVGVNVFTPTRGILYSLIQNVNGIVPGIKPETAFGLWIARKVVSSVTNPNVSVVSIYTISDAVGQNPTTINGGFSIDLTKLLEKRDLLSERLEAIARNALSISSNMRERYIVLANYIYEYLTGSKRLEDLLYFANRDLIMNLNSDDGKVRDLKLISAYVNGELIRGEG

SEQ ID NO: 53 - protein, 986 aa, Unknown
  Description of Unknown: Deltaproteobacteria CasX
MEKRINKIRKKLSADNATKPVSRSGPMKTLLVRVMTDDLKKRLEKRRKKPEVMPQVISNNAANNLRMLLDDYTKMKEAILQVYWQEFKDDHVGLMCKFAQPASKKIDQNKLKPEMDEKGNLTTAGFACSQCGQPLFVYKLEQVSEKGKAYTNYFGRCNVAEHEKLILLAQLKPVKDSDEAVTYSLGKFGQRALDFYSIHVTKESTHPVKPLAQIAGNRYASGPVGKALSDACMGTIASFLSKYQDIIIEHQKVVKGNQKRLESLRELAGKENLEYPSVTLPPQPHTKEGVDAYNEVIARVRMWVNLNLWQKLKLSRDDAKPLLRLKGFPSFPVVERRENEVDWWNTINEVKKLIDAKRDMGRVFWSGVTAEKRNTILEGYNYLPNENDHKKREGSLENPKKPAKRQFGDLLLYLEKKYAGDWGKVFDEAWERIDKKIAGLTSHIEREEARNAEDAQSKAVLTDWLRAKASFVLERLKEMDEKEFYACEIQLQKWYGDLRGNPFAVEAENRVVDISGFSIGSDGHSIQYRNLLAWKYLENGKREFYLLMNYGKKGRIRFTDGTDIKKSGKWQGLLYGGGKAKVIDLTFDPDDEQLIILPLAFGTRQGREFIWNDLLSLETGLIKLANGRVIEKTIYNKKIGRDEPALFVALTFERREVVDPSNIKPVNLIGVARGENIPAVIALTDPEGCPLPEFKDSSGGPTDILRIGEGYKEKQRAIQAAKEVEQRRAGGYSRKFASKSRNLADDMVRNSARDLFYHAVTHDAVLVFANLSRGFGRQGKRTFMTERQYTKMEDWLTAKLAYEGLTSKTYLSKTLAQYTSKTCSNCGFTITYADMDVMLVRLKKTSDGWATTLNNKELKAEYQITYYNRYKRQTVEKELSAELDRLSEESGNNDISKWTKGRRDEALFLLKKRFSHRPVQEQFVCLDCGHEVHAAEQAALNIARSWLFLNSNSTEFKSYKSGKQPFVGAWQAFYKRRLKEVWKPNA

SEQ ID NO: 54 - protein, 1210 aa, Unknown
  Description of Unknown: uncultured Parcubacteria group bacterium
MSKRHPRISGVKGYRLHAQRLEYTGKSGAMRTIKYPLYSSPSGGRTVPREIVSAINDDYVGLYGLSNFDDLYNAEKRNEEKVYSVLDFWYDCVQYGAVFSYTAPGLLKNVAEVRGGSYELTKTLKGSHLYDELQIDKVIKFLNKKEISRANGSLDKLKKDIIDCFKAEYRERHKDQCNKLADDIKNAKKDAGASLGERQKKLFRDFFGISEQSENDKPSFTNPLNLTCCLLPFDTVNNNRNRGEVLFNKLKEYAQKLDKNEGSLEMWEYIGIGNSGTAFSNFLGEGFLGRLRENKITELKKAMMDITDAWRGQEQEEELEKRLRILAALTIKLREPKFDNHWGGYRSDINGKLSSWLQNYINQTVKIKEDLKGHKKDLKKAKEMINRFGESDTKEEAVVSSLLESIEKIVPDDSADDEKPDIPAIAIYRRFLSDGRLTLNRFVQREDVQEALIKERLEAEKKKKPKKRKKKSDAEDEKETIDFKELFPHLAKPLKLVPNFYGDSKRELYKKYKNAAIYTDALWKAVEKIYKSAFSSSLKNSFFDTDFDKDFFIKRLQKIFSVYRRFNTDKWKPIVKNSFAPYCDIVSLAENEVLYKPKQSRSRKSAAIDKNRVRLPSTENIAKAGIALARELSVAGFDWKDLLKKEEHEEYIDLIELHKTALALLLAVTETQLDISALDFVENGTVKDFMKTRDGNLVLEGRFLEMFSQSIVFSELRGLAGLMSRKEFITRSAIQTMNGKQAELLYIPHEFQSAKITTPKEMSRAFLDLAPAEFATSLEPESLSEKSLLKLKQMRYYPHYFGYELTRTGQGIDGGVAENALRLEKSPVKKREIKCKQYKTLGRGQNKIVLYVRSSYYQTQFLEWFLHRPKNVQTDVAVSGSFLIDEKKVKTRWNYDALTVALEPVSGSERVFVSQPFTIFPEKSAEEEGQRYLGIDIGEYGIAYTALEITGDSAKILDQNFISDPQLKTLREEVKGLKLDQRRGTFAMPSTKIARIRESLVHSLRNRIHHLALKHKAKIVYELEVSRFEEGKQKIKKVYATLKKADVYSEIDADKNLQTTVWGKLAVASEISASYTSQFCGACKKLWRAEMQVDETITTQELIGTVRVIKGGTLIDAIKDFMRPPIFDENDTPFPKYRDFCDKHHISKKMRGNSCLFICPFCRANADADIQASQTIALLRYVKEEKKVEDYFERFRKLKNIKVLGQMKKI

SEQ ID NO: 55 - protein, 1140 aa, Bacillus hisashii
MAPKKKRKVGIHGVPAAATRSFILKIEPNEEVKKGLWKTHEVLNHGIAYYMNILKLIRQEAIYEHHEQDPKNPKKVSKAEIQAELWDFVLKMQKCNSFTHEVDKDEVFNILRELYEELVPSSVEKKGEANQLSNKFLYPLVDPNSQSGKGTASSGRKPRWYNLKIAGDPSWEEEKKKWEEDKKKDPLAKILGKLAEYGLIPLFIPYTDSNEPIVKEIKWMEKSRNQSVRRLDKDMFIQALERFLSWESWNLKVKEEYEKVEKEYKTLEERIKEDIQALKALEQYEKERQEQLLRDTLNTNEYRLSKRGLRGWREIIQKWLKMDENEPSEKYLEVFKDYQRKHPREAGDYSVYEFLSKKENHFIWRNHPEYPYLYATFCEIDKKKKDAKQQATFTLADPINHPLWVRFEERSGSNLNKYRILTEQLHTEKLKKKLTVQLDRLIYPTESGGWEEKGKVDIVLLPSRQFYNQIFLDIEEKGKHAFTYKDESIKFPLKGTLGGARVQFDRDHLRRYPHKVESGNVGRIYFNMTVNIEPTESPVSKSLKIHRDDFPKVVNFKPKELTEWIKDSKGKKLKSGIESLEIGLRVMSIDLGQRQAAAASIFEVVDQKPDIEGKLFFPIKGTELYAVHRASFNIKLPGETLVKSREVLRKAREDNLKLMNQKLNFLRNVLHFQQFEDITEREKRVTKWISRQENSDVPLVYQDELIQIRELMYKPYKDWVAFLKQLHKRLEVEIGKEVKHWRKSLSDGRKGLYGISLKNIDEIDRTRKFLLRWSLRPTEPGEVRRLEPGQRFAIDQLNHLNALKEDRLKKMANTIIMHALGYCYDVRKKKWQAKNPACQIILFEDLSNYNPYEERSRFENSKLMKWSRREIPRQVALQGEIYGLQVGEVGAQFSSRFHAKTGSPGIRCSVVTKEKLQDNRFFKNLQREGRLTLDKIAVLKEGDLYPDKGGEKFISLSKDRKCVTTHADINAAQNLQKRFWTRTHGFYKVYCKAYQVDGQTVYIPESKDQKQKIIEEFGEGYFILKDGVYEWVNAGKLKIKKGSSKQSSSELVDSDILKDSFDLASELKGEKLMLYRDPSGNVFPSDKWMAAGVFFGKLERILISKLTNQYSISTIEDDSSKQSMKRPAATKKAGQAKKKK

SEQ ID NO: 56 - DNA, 306 bp, Artificial Sequence
  Description of Artificial Sequence: Synthetic polynucleotide
tgcctgtcatacgaaaccgagatactgacagtagaatatggccttctgccaatcgggaagattgtggagaaacggatagaatgcacagtttactctgtcgataacaatggtaacatttatactcagccagttgcccagtggcacgaccggggagagcaggaagtattcgaatactgtctggaggatggaagtctcattagggccactaaggaccacaaatttatgacagtcgatggccagatgctgcctatagacgaaatctttgagcgagagttggacctcatgcgagttgacaaccttcctaat

SEQ ID NO: 57 - protein, 102 aa, Artificial Sequence
  Description of Artificial Sequence: Synthetic polypeptide
CLSYETEILTVEYGLLPIGKIVEKRIECTVYSVDNNGNIYTQPVAQWHDRGEQEVFEYCLEDGSLIRATKDHKFMTVDGQMLPIDEIFERELDLMRVDNLPN

SEQ ID NO: 58 - DNA, 108 bp, Artificial Sequence
  Description of Artificial Sequence: Synthetic polynucleotide
atgatcaagatagctacaaggaagtatcttggcaaacaaaacgtttatgatattggagtcgaaagagatcacaactttgctctgaagaacggattcatagcttctaat

SEQ ID NO: 59 - protein, 36 aa, Artificial Sequence
  Description of Artificial Sequence: Synthetic polypeptide
MIKIATRKYLGKQNVYDIGVERDHNFALKNGFIASN

SEQ ID NO: 60 - DNA, 303 bp, Artificial Sequence
  Description of Artificial Sequence: Synthetic polynucleotide
tgcctgtcttatgataccgagatacttaccgttgaatatggcttcttgcctattggaaagattgtcgaagagagaattgaatgcacagtatatactgtagacaagaatggtttcgtttacacacagcccattgctcaatggcacaatcgcggcgaacaagaagtatttgagtactgtctcgaggatggaagcatcatacgagcaactaaagatcataaattcatgaccactgacgggcagatgttgccaatagatgagatattcgagcggggcttggatctcaaacaagtggatggattgcca

SEQ ID NO: 61 - protein, 101 aa, Artificial Sequence
  Description of Artificial Sequence: Synthetic polypeptide
CLSYDTEILTVEYGFLPIGKIVEERIECTVYTVDKNGFVYTQPIAQWHNRGEQEVFEYCLEDGSIIRATKDHKFMTTDGQMLPIDEIFERGLDLKQVDGLP

SEQ ID NO: 62 - DNA, 159 bp, Artificial Sequence
  Description of Artificial Sequence: Synthetic polynucleotide
atgaagaggactgccgatggatcagagtttgaatctcccaagaagaagaggaaagtaaagataatatctcgaaaaagtcttggtacccaaaatgtctatgatattggagtggagaaagatcacaacttccttctcaagaacggtctcgtagccagcaac

SEQ ID NO: 63 - protein, 53 aa, Artificial Sequence
  Description of Artificial Sequence: Synthetic polypeptide
MKRTADGSEFESPKKKRKVKIISRKSLGTQNVYDIGVEKDHNFLLKNGLVASN

SEQ ID NO: 64 - protein, 24 aa, Artificial Sequence
  Description of Artificial Sequence: Synthetic peptide
SGGSSGSETPGTSESATPESSGGS

SEQ ID NO: 65 - protein, 32 aa, Artificial Sequence
  Description of Artificial Sequence: Synthetic polypeptide
SGGSSGGSSGSETPGTSESATPESSGGSSGGS

SEQ ID NO: 66 - protein, 104 aa, Artificial Sequence
  Description of Artificial Sequence: Synthetic polypeptide
GGSGGSPGSPAGSPTSTEEGTSESATPESGPGTSTEPSEGSAPGSPAGSPTSTEEGTSTEPSEGSAPGTSTEPSEGSAPGTSESATPESGPGSEPATSGGSGGS

SEQ ID NO: 67 - protein, 16 aa, Artificial Sequence
  Description of Artificial Sequence: Synthetic peptide
SGSETPGTSESATPES

SEQ ID NO: 68 - protein, 4 aa, Artificial Sequence
  Description of Artificial Sequence: Synthetic peptide
SGGS

SEQ ID NO: 69 - protein, 120 aa, Artificial Sequence
  Description of Artificial Sequence: Synthetic polypeptide
  MISC_FEATURE (1)..(120): This sequence may encompass 1-30 "Ser Gly Gly Ser" repeating units
SGGSSGGSSGGSSGGSSGGSSGGSSGGSSGGSSGGSSGGSSGGSSGGSSGGSSGGSSGGSSGGSSGGSSGGSSGGSSGGSSGGSSGGSSGGSSGGSSGGSSGGSSGGSSGGSSGGSSGGS

SEQ ID NO: 70 - protein, 120 aa, Artificial Sequence
  Description of Artificial Sequence: Synthetic polypeptide
  MISC_FEATURE (1)..(120): This sequence may encompass 1-30 "Gly Gly Gly Ser" repeating units
GGGSGGGSGGGSGGGSGGGSGGGSGGGSGGGSGGGSGGGSGGGSGGGSGGGSGGGSGGGSGGGSGGGSGGGSGGGSGGGSGGGSGGGSGGGSGGGSGGGSGGGSGGGSGGGSGGGSGGGS

SEQ ID NO: 71 - protein, 150 aa, Artificial Sequence
  Description of Artificial Sequence: Synthetic polypeptide
  MISC_FEATURE (1)..(150): This sequence may encompass 1-30 "Gly Gly Gly Gly Ser" repeating units
GGGGSGGGGSGGGGSGGGGSGGGGSGGGGSGGGGSGGGGSGGGGSGGGGSGGGGSGGGGSGGGGSGGGGSGGGGSGGGGSGGGGSGGGGSGGGGSGGGGSGGGGSGGGGSGGGGSGGGGSGGGGSGGGGSGGGGSGGGGSGGGGSGGGGS

SEQ ID NO: 72 - protein, 30 aa, Artificial Sequence
  Description of Artificial Sequence: Synthetic polypeptide
  MISC_FEATURE (1)..(30): This sequence may encompass 1-30 residues
GGGGGGGGGGGGGGGGGGGGGGGGGGGGGG

SEQ ID NO: 73 - protein, 150 aa, Artificial Sequence
  Description of Artificial Sequence: Synthetic polypeptide
  MISC_FEATURE (1)..(150): This sequence may encompass 1-30 "Glu Ala Ala Ala Lys" repeating units
EAAAKEAAAKEAAAKEAAAKEAAAKEAAAKEAAAKEAAAKEAAAKEAAAKEAAAKEAAAKEAAAKEAAAKEAAAKEAAAKEAAAKEAAAKEAAAKEAAAKEAAAKEAAAKEAAAKEAAAKEAAAKEAAAKEAAAKEAAAKEAAAKEAAAK

SEQ ID NO: 74 - protein, 90 aa, Artificial Sequence
  Description of Artificial Sequence: Synthetic polypeptide
  MISC_FEATURE (1)..(90): This sequence may encompass 1-30 "Gly Gly Ser" repeating units
GGSGGSGGSGGSGGSGGSGGSGGSGGSGGSGGSGGSGGSGGSGGSGGSGGSGGSGGSGGSGGSGGSGGSGGSGGSGGSGGSGGSGGSGGS

SEQ ID NO: 75 - protein, 60 aa, Artificial Sequence
  Description of Artificial Sequence: Synthetic polypeptide
  MOD_RES (1)..(1): Any amino acid
  MOD_RES (3)..(3): Any amino acid
  MOD_RES (5)..(5): Any amino acid
  MOD_RES (7)..(7): Any amino acid
  MOD_RES (9)..(9): Any amino acid
  MOD_RES (11)..(11): Any amino acid
  MOD_RES (13)..(13): Any amino acid
  MOD_RES (15)..(15): Any amino acid
  MOD_RES (17)..(17): Any amino acid
  MOD_RES (19)..(19): Any amino acid
  MOD_RES (21)..(21): Any amino acid
  MOD_RES (23)..(23): Any amino acid
  MOD_RES (25)..(25): Any amino acid
  MOD_RES (27)..(27): Any amino acid
  MOD_RES (29)..(29): Any amino acid
  MOD_RES (31)..(31): Any amino acid
  MOD_RES (33)..(33): Any amino acid
  MOD_RES (35)..(35): Any amino acid
  MOD_RES (37)..(37): Any amino acid
  MOD_RES (39)..(39): Any amino acid
  MOD_RES (41)..(41): Any amino acid
  MOD_RES (43)..(43): Any amino acid
  MOD_RES (45)..(45): Any amino acid
  MOD_RES (47)..(47): Any amino acid
  MOD_RES (49)..(49): Any amino acid
  MOD_RES (51)..(51): Any amino acid
  MOD_RES (53)..(53): Any amino acid
  MOD_RES (55)..(55): Any amino acid
  MOD_RES (57)..(57): Any amino acid
  MOD_RES (59)..(59): Any amino acid
  MISC_FEATURE (1)..(60): This sequence may encompass 1-30 "Xaa Pro" repeating units
XPXPXPXPXPXPXPXPXPXPXPXPXPXPXPXPXPXPXPXPXPXPXPXPXPXPXPXPXPXP

SEQ ID NO: 76 - protein, 24 aa, Artificial Sequence
  Description of Artificial Sequence: Synthetic peptide
SGGSSGGSSGSETPGTSESATPES

SEQ ID NO: 77 - protein, 40 aa, Artificial Sequence
  Description of Artificial Sequence: Synthetic polypeptide
SGGSSGGSSGSETPGTSESATPESSGGSSGGSSGGSSGGS

SEQ ID NO: 78 - protein, 64 aa, Artificial Sequence
  Description of Artificial Sequence: Synthetic polypeptide
SGGSSGGSSGSETPGTSESATPESSGGSSGGSSGGSSGGSSGSETPGTSESATPESSGGSSGGS

SEQ ID NO: 79 - protein, 92 aa, Artificial Sequence
  Description of Artificial Sequence: Synthetic polypeptide
PGSPAGSPTSTEEGTSESATPESGPGTSTEPSEGSAPGSPAGSPTSTEEGTSTEPSEGSAPGTSTEPSEGSAPGTSESATPESGPGSEPATS

SEQ ID NO: 80 - protein, 18 aa, Artificial Sequence
  Description of Artificial Sequence: Synthetic peptide
KRTADGSEFESPKKKRKV

SEQ ID NO: 81 - protein, 16 aa, Artificial Sequence
  Description of Artificial Sequence: Synthetic peptide
KRPAATKKAGQAKKKK

SEQ ID NO: 82 - protein, 17 aa, Artificial Sequence
  Description of Artificial Sequence: Synthetic peptide
KKTELQTTNAENKTKKL

SEQ ID NO: 83 - protein, 19 aa, Artificial Sequence
  Description of Artificial Sequence: Synthetic peptide
KRGINDRNFWRGENGRKTR

SEQ ID NO: 84 - protein, 16 aa, Artificial Sequence
  Description of Artificial Sequence: Synthetic peptide
RKSGKIAAIVVKRPRK

SEQ ID NO: 85 - protein, 7 aa, Artificial Sequence
  Description of Artificial Sequence: Synthetic peptide
PKKKRKV

SEQ ID NO: 86 - protein, 30 aa, Artificial Sequence
  Description of Artificial Sequence: Synthetic polypeptide
MDSLLMNRRKFLYQFKNVRWAKGRRETYLC

SEQ ID NO: 87 - protein, 84 aa, Bacillus phage PBS2
MTNLSDIIEKETGKQLVIQESILMLPEEVEEVIGNKPESDILVHTAYDESTDENVMLLTSDAPEYKPWALVIQDSNGENKIKML

SEQ ID NO: 88 - protein, 167 aa, Artificial Sequence
  Description of Artificial Sequence: Synthetic polypeptide
MSEVEFSHEYWMRHALTLAKRARDEREVPVGAVLVLNNRVIGEGWNRAIGLHDPTAHAEIMALRQGGLVMQNYRLIDATLYVTFEPCVMCAGAMIHSRIGRVVFGVRNAKTGAAGSLMDVLHYPGMNHRVEITEGILADECAALLCRFFRMPRQVFNAQKKAQSSTD

SEQ ID NO: 89 - protein, 167 aa, Artificial Sequence
  Description of Artificial Sequence: Synthetic polypeptide
MSEVEFSHEYWMRHALTLAKRARDEREVPVGAVLVLNNRVIGEGWNRAIGLHDPTAHAEIMALRQGGLVMQNYRLIDATLYVTFEPCVMCAGAMIHSRIGRVVFGVRNAKTGAAGSLMDVLHYPGMNHRVEITEGILADECAALLCYFFRMPRSVFNAQKKAQSSTD

SEQ ID NO: 90 - protein, 167 aa, Artificial Sequence
  Description of Artificial Sequence: Synthetic polypeptide
MSEVEFSHEYWMRHALTLAKRARDEREVPVGAVLVLNNRVIGEGWNRAIGLHDPTAHAEIMALRQGGLVMQNYRLIDATLYVTFEPCVMCAGAMIHSRIGRVVFGVRNAKTGAAGSLMDVLHHPGMNHRVEITEGILADECAALLCYFFRMPRQVFNAQKKAQSSTD

SEQ ID NO: 91 - protein, 167 aa, Artificial Sequence
  Description of Artificial Sequence: Synthetic polypeptide
MSEVEFSHEYWMRHALTLAKRARDEREVPVGAVLVLNNRVIGEGWNRAIGLHDPTAHAEIMALRQGGLVMQNYRLIDATLYSTFEPCVMCAGAMIHSRIGRVVFGVRNAKTGAAGSLMDVLHYPGMNHRVEITEGILADECAALLCYFFRMPRQVFNAQKKAQSSTD

SEQ ID NO: 92 - protein, 167 aa, Artificial Sequence
  Description of Artificial Sequence: Synthetic polypeptide
MSEVEFSHEYWMRHALTLAKRARDEREVPVGAVLVLNNRVIGEGWNRAIGLHDPTAHAEIMALRQGGLVMQNYRLIDATLYVTFEPCVMCAGAMIHSRIGRVVFGVRNAKTGAAGSLMDVLHYPGMNHRVEITEGILADECAALLCYFFRMPRQVFNAQKKAQSSRD

SEQ ID NO: 93 - protein, 167 aa, Artificial Sequence
  Description of Artificial Sequence: Synthetic polypeptide
MSEVEFSHEYWMRHALTLAKRARDEREVPVGAVLVLNNRVIGEGWNRAIGLHDPTAHAEIMALRQGGLVMQNYRLIDATLYVTFEPCVMCAGAMIHSRIGRVVFGVRNAKTGAAGSLMDVLHYPGMNHRVEITEGILADECAALLCYFFRMPRRVFNAQKKAQSSTD

SEQ ID NO: 94 - protein, 167 aa, Artificial Sequence
  Description of Artificial Sequence: Synthetic polypeptide
MSEVEFSHEYWMRHALTLAKRARDEREVPVGAVLVLNNRVIGEGWNRAIGLHDPTAHAEIMALRQGGLVMQNYRLIDATLYVTFEPCVMCAGAMIHSRIGRVVFGVRNAKTGAAGSLMDVLHHPGMNHRVEITEGILADECAALLCRFFRMPRRVFNAQKKAQSSTD

SEQ ID NO: 95 - protein, 167 aa, Artificial Sequence
  Description of Artificial Sequence: Synthetic polypeptide
MSEVEFSHEYWMRHALTLAKRARDEREVPVGAVLVLNNRVIGEGWNRAIGLHDPTAHAEIMALRQGGLVMQNYRLYDATLYVTFEPCVMCAGAMIHSRIGRVVFGVRNAKTGAAGSLMDVLHYPGMNHRVEITEGILADECAALLCRFFRMPRRVFNAQKKAQSSTD

SEQ ID NO: 96 - protein, 167 aa, Artificial Sequence
  Description of Artificial Sequence: Synthetic polypeptide
MSEVEFSHEYWMRHALTLAKRARDEREVPVGAVLVLNNRVIGEGWNRAIGLHDPTAHAEIMALRQGGLVMQNYRLIDATLYVTFEPCVMCAGAMIHSRIGRVVFGVRNAKTGAAGSLMDVLHYPGMNHRVEITEGILADECAALLCRFFRMPRRVFNAQKKAQSSRD

SEQ ID NO: 97 - protein, 167 aa, Artificial Sequence
  Description of Artificial Sequence: Synthetic polypeptide
MSEVEFSHEYWMRHALTLAKRARDEREVPVGAVLVLNNRVIGEGWNRAIGLHDPTAHAEIMALRQGGLVMQNYRLIDATLYVTFEPCVMCAGAMIHSRIGRVVFGVRNAKTGAAGSLMDVLHYPGMNHRVEITEGILADECAALLCTFFRMPRRVFNAQKKAQSSTD

SEQ ID NO: 98 - protein, 167 aa, Artificial Sequence
  Description of Artificial Sequence: Synthetic polypeptide
MSEVEFSHEYWMRHALTLAKRARDEREVPVGAVLVLNNRVIGEGWNRAIGLHDPTAHAEIMALRQGGLVMQNYRLIDATLYVTFEPCVMCAGAMIHSRIGRVVFGVRNAKTGAAGSLMDVLHYPGMNHRVEITEGILADECAALLCTFFRMPRSVFNAQKKAQSSTD

SEQ ID NO: 99 - protein, 167 aa, Artificial Sequence
  Description of Artificial Sequence: Synthetic polypeptide
MSEVEFSHEYWMRHALTLAKRARDEREVPVGAVLVLNNRVIGEGWNRAIGLHDPTAHAEIMALRQGGLVMQNYRLYDATLYVTFEPCVMCAGAMIHSRIGRVVFGVRNAKTGAAGSLMDVLHHPGMNHRVEITEGILADECAALLCRFFRMPRRVFNAQKKAQSSTD

SEQ ID NO: 100 - protein, 167 aa, Artificial Sequence
  Description of Artificial Sequence: Synthetic polypeptide
MSEVEFSHEYWMRHALTLAKRARDEREVPVGAVLVLNNRVIGEGWNRAIGLHDPTAHAEIMALRQGGLVMQNYRLIDATLYSTFEPCVMCAGAMIHSRIGRVVFGVRNAKTGAAGSLMDVLHYPGMNHRVEITEGILADECAALLCYFFRMPRRVFNAQKKAQSSTD

SEQ ID NO: 101 - RNA, 80 nt, Artificial Sequence
  Description of Artificial Sequence: Synthetic oligonucleotide
guuuuagagcuagaaauagcaaguuaaaauaaggcuaguccguuaucaacuugaaaaaguggcaccgagucggugcuuuu

SEQ ID NO: 102 - protein, 1368 aa, Streptococcus pyogenes
MDKKYSIGLAIGTNSVGWAVITDEYKVPSKKFKVLGNTDRHSIKKNLIGALLFDSGETAEATRLKRTARRRYTRRKNRICYLQEIFSNEMAKVDDSFFHRLEESFLVEEDKKHERHPIFGNIVDEVAYHEKYPTIYHLRKKLVDSTDKADLRLIYLALAHMIKFRGHFLIEGDLNPDNSDVDKLFIQLVQTYNQLFEENPINASGVDAKAILSARLSKSRRLENLIAQLPGEKKNGLFGNLIALSLGLTPNFKSNFDLAEDAKLQLSKDTYDDDLDNLLAQIGDQYADLFLAAKNLSDAILLSDILRVNTEITKAPLSASMIKRYDEHHQDLTLLKALVRQQLPEKYKEIFFDQSKNGYAGYIDGGASQEEFYKFIKPILEKMDGTEELLVKLNREDLLRKQRTFDNGSIPHQIHLGELHAILRRQEDFYPFLKDNREKIEKILTFRIPYYVGPLARGNSRFAWMTRKSEETITPWNFEEVVDKGASAQSFIERMTNFDKNLPNEKVLPKHSLLYEYFTVYNELTKVKYVTEGMRKPAFLSGEQKKAIVDLLFKTNRKVTVKQLKEDYFKKIECFDSVEISGVEDRFNASLGTYHDLLKIIKDKDFLDNEENEDILEDIVLTLTLFEDREMIEERLKTYAHLFDDKVMKQLKRRRYTGWGRLSRKLINGIRDKQSGKTILDFLKSDGFANRNFMQLIHDDSLTFKEDIQKAQVSGQGDSLHEHIANLAGSPAIKKGILQTVKVVDELVKVMGRHKPENIVIEMARENQTTQKGQKNSRERMKRIEEGIKELGSQILKEHPVENTQLQNEKLYLYYLQNGRDMYVDQELDINRLSDYDVDHIVPQSFLKDDSIDNKVLTRSDKNRGKSDNVPSEEVVKKMKNYWRQLLNAKLITQRKFDNLTKAERGGLSELDKAGFIKRQLVETRQITKHVAQILDSRMNTKYDENDKLIREVKVITLKSKLVSDFRKDFQFYKVREINNYHHAHDAYLNAVVGTALIKKYPKLESEFVYGDYKVYDVRKMIAKSEQEIGKATAKYFFYSNIMNFFKTEITLANGEIRKRPLIETNGETGEIVWDKGRDFATVRKVLSMPQVNIVKKTEVQTGGFSKESILPKRNSDKLIARKKDWDPKKYGGFDSPTVAYSVLVVAKVEKGKSKKLKSVKELLGITIMERSSFEKNPIDFLEAKGYKEVKKDLIIKLPKYSLFELENGRKRMLASAGELQKGNELALPSKYVNFLYLASHYEKLKGSPEDNEQKQLFVEQHKHYLDEIIEQISEFSKRVILADANLDKVLSAYNKHRDKPIREQAENIIHLFTLTNLGAPAAFKYFDTTIDRKRYTSTKEVLDATLIHQSITGLYETRIDLSQLGGD

SEQ ID NO: 103 - protein, 1368 aa, Artificial Sequence; identical to SEQ ID NO: 102
  Description of Artificial Sequence: Synthetic polypeptide

SEQ ID NO: 104 - protein, 1082 aa, Neisseria meningitidis
MAAFKPNPINYILGLDIGIASVGWAMVEIDEDENPICLIDLGVRVFERAEVPKTGDSLAMARRLARSVRRLTRRRAHRLLRARRLLKREGVLQAADFDENGLIKSLPNTPWQLRAAALDRKLTPLEWSAVLLHLIKHRGYLSQRKNEGETADKELGALLKGVADNAHALQTGDFRTPAELALNKFEKESGHIRNQRGDYSHTFSRKDLQAELILLFEKQKEFGNPHVSGGLKEGIETLLMTQRPALSGDAVQKMLGHCTFEPAEPKAAKNTYTAERFIWLTKLNNLRILEQGSERPLTDTERATLMDEPYRKSKLTYAQARKLLGLEDTAFFKGLRYGKDNAEASTLMEMKAYHAISRALEKEGLKDKKSPLNLSPELQDEIGTAFSLFKTDEDITGRLKDRIQPEILEALLKHISFDKFVQISLKALRRIVPLMEQGKRYDEACAEIYGDHYGKKNTEEKIYLPPIPADEIRNPVVLRALSQARKVINGVVRRYGSPARIHIETAREVGKSFKDRKEIEKRQEENRKDREKAAAKFREYFPNFVGEPKSKDILKLRLYEQQHGKCLYSGKEINLGRLNEKGYVEIDHALPFSRTWDDSFNNKVLVLGSENQNKGNQTPYEYFNGKDNSREWQEFKARVETSRFPRSKKQRILLQKFDEDGFKERNLNDTRYVNRFLCQFVADRMRLTGKGKKRVFASNGQITNLLRGFWGLRKVRAENDRHHALDAVVVACSTVAMQQKITRFVRYKEMNAFDGKTIDKETGEVLHQKTHFPQPWEFFAQEVMIRVFGKPDGKPEFEEADTPEKLRTLLAEKLSSRPEAVHEYVTPLFVSRAPNRKMSGQGHMETVKSAKRLDEGVSVLRVPLTQLKLKDLEKMVNREREPKLYEALKARLEAHKDDPAKAFAEPFYKYDKAGNRTQQVKAVRVEQVQKTGVWVRNHNGIADNATMVRVDVFEKGDKYYLVPIYSWQVAKGILPDRAVVQGKDEEDWQLIDDSFNFKFSLHPNDLVEVITKKARMFGYFASCHRGTGNINIRIHDLDHKIGKNGILEGIGVKTALSFQKYQIDELGKEIRPCRLKKRPPVR

SEQ ID NO: 105 - protein, 1082 aa, Neisseria meningitidis
MAAFKPNPINYILGLDIGIASVGWAMVEIDEEENPIRLIDLGVRVFERAEVPKTGDSLAMARRLARSVRRLTRRRAHRLLRARRLLKREGVLQAADFDENGLIKSLPNTPWQLRAAALDRKLTPLEWSAVLLHLIKHRGYLSQRKNEGETADKELGALLKGVANNAHALQTGDFRTPAELALNKFEKESGHIRNQRGDYSHTFSRKDLQAELILLFEKQKEFGNPHVSGGLKEGIETLLMTQRPALSGDAVQKMLGHCTFEPAEPKAAKNTYTAERFIWLTKLNNLRILEQGSERPLTDTERATLMDEPYRKSKLTYAQARKLLGLEDTAFFKGLRYGKDNAEASTLMEMKAYHAISRALEKEGLKDKKSPLNLSSELQDEIGTAFSLFKTDEDITGRLKDRVQPEILEALLKHISFDKFVQISLKALRRIVPLMEQGKRYDEACAEIYGDHYGKKNTEEKIYLPPIPADEIRNPVVLRALSQARKVINGVVRRYGSPARIHIETAREVGKSFKDRKEIEKRQEENRKDREKAAAKFREYFPNFVGEPKSKDILKLRLYEQQHGKCLYSGKEINLVRLNEKGYVEIDHALPFSRTWDDSFNNKVLVLGSENQNKGNQTPYEYFNGKDNSREWQEFKARVETSRFPRSKKQRILLQKFDEDGFKECNLNDTRYVNRFLCQFVADHILLTGKGKRRVFASNGQITNLLRGFWGLRKVRAENDRHHALDAVVVACSTVAMQQKITRFVRYKEMNAFDGKTIDKETGKVLHQKTHFPQPWEFFAQEVMIRVFGKPDGKPEFEEADTPEKLRTLLAEKLSSRPEAVHEYVTPLFVSRAPNRKMSGAHKDTLRSAKRFVKHNEKISVKRVWLTEIKLADLENMVNYKNGREIELYEALKARLEAYGGNAKQAFDPKDNPFYKKGGQLVKAVRVEKTQESGVLLNKKNAYTIADNGDMVRVDVFCKVDKKGKNQYFIVPIYAWQVAENILPDIDCKGYRIDDSYTFCFSLHKYDLIAFQKDEKSKVEFAYYINCDSSNGRFYLAWHDKGSKEQQFRISTQNLVLIQKYQVNELGKEIRPCRLKKRPPVR

SEQ ID NO: 106 - protein, 987 aa, Unknown
  Description of Unknown: Deltaproteobacteria CasX
MEKRINKIRKKLSADNATKPVSRSGPMKTLLVRVMTDDLKKRLEKRRKKPEVMPQVISNNAANNLRMLLDDYTKMKEAILQVYWQEFKDDHVGLMCKFAQPASKKIDQNKLKPEMDEKGNLTTAGFACSQCGQPLFVYKLEQVSEKGKAYTNYFGRCNVAEHEKLILLAQLKPVKDSDEAVTYSLGKFGQRALDFYSIHVTKESTHPVKPLAQIAGNRYASGPVGKALSDACMGTIASFLSKYQDIIIEHQKVVKGNQKRLESLRELAGKENLEYPSVTLPPQPHTKEGVDFAYNEVIARVRMWVNLNLWQKLKLSRDDAKPLLRLKGFPSFPVVERRENEVDWWNTINEVKKLIDAKRDMGRVFWSGVTAEKRNTILEGYNYLPNENDHKKREGSLENPKKPAKRQFGDLLLYLEKKYAGDWGKVFDEAWERIDKKIAGLTSHIEREEARNAEDAQSKAVLTDWLRAKASFVLERLKEMDEKEFYACEIQLQKWYGDLRGNPFAVEAENRVVDISGFSIGSDGHSIQYRNLLAWKYLENGKREFYLLMNYGKKGRIRFTDGTDIKKSGKWQGLLYGGGKAKVIDLTFDPDDEQLIILPLAFGTRQGREFIWNDLLSLETGLIKLANGRVIEKTIYNKKIGRDEPALFVALTFERREVVDPSNIKPVNLIGVARGENIPAVIALTDPEGCPLPEFKDSSGGPTDILRIGEGYKEKQRAIQAAKEVEQRRAGGYSRKFASKSRNLADDMVRNSARDLFYHAVTHDAVLVFANLSRGFGRQGKRTFMTERQYTKMEDWLTAKLAYEGLTSKTYLSKTLAQYTSKTCSNCGFTITYADMDVMLVRLKKTSDGWATTLNNKELKAEYQITYYNRYKRQTVEKELSAELDRLSEESGNNDISKWTKGRRDEALFLLKKRFSHRPVQEQFVCLDCGHEVHAAEQAALNIARSWLFLNSNSTEFKSYKSGKQPFVGAWQAFYKRRLKEVWKPNA

SEQ ID NO: 107 - protein, 1300 aa, Francisella novicida
MSIYQEFVNKYSLSKTLRFELIPQGKTLENIKARGLILDDEKRAKDYKKAKQIIDKYHQFFIEEILSSVCISEDLLQNYSDVYFKLKKSDDDNLQKDFKSAKDTIKKQISEYIKDSEKFKNLFNQNLIDAKKGQESDLILWLKQSKDNGIELFKANSDITDIDEALEIIKSFKGWTTYFKGFHENRKNVYSSNDIPTSIIYRIVDDNLPKFLENKAKYESLKDKAPEAINYEQIKKDLAEELTFDIDYKTSEVNQRVFSLDEVFEIANFNNYLNQSGITKFNTIIGGKFVNGENTKRKGINEYINLYSQQINDKTLKKYKMSVLFKQILSDTESKSFVIDKLEDDSDVVTTMQSFYEQIAAFKTVEEKSIKETLSLLFDDLKAQKLDLSKIYFKNDKSLTDLSQQVFDDYSVIGTAVLEYITQQIAPKNLDNPSKKEQELIAKKTEKAKYLSLETIKLALEEFNKHRDIDKQCRFEEILANFAAIPMIFDEIAQNKDNLAQISIKYQNQGKKDLLQASAEDDVKAIKDLLDQTNNLLHKLKIFHISQSEDKANILDKDEHFYLVFEECYFELANIVPLYNKIRNYITQKPYSDEKFKLNFENSTLANGWDKNKEPDNTAILFIKDDKYYLGVMNKKNNKIFDDKAIKENKGEGYKKIVYKLLPGANKMLPKVFFSAKSIKFYNPSEDILRIRNHSTHTKNGSPQKGYEKFEFNIEDCRKFIDFYKQSISKHPEWKDFGFRFSDTQRYNSIDEFYREVENQGYKLTFENISESYIDSVVNQGKLYLFQIYNKDFSAYSKGRPNLHTLYWKALFDERNLQDVVYKLNGEAELFYRKQSIPKKITHPAKEAIANKNKDNPKKESVFEYDLIKDKRFTEDKFFFHCPITINFKSSGANKFNDEINLLLKEKANDVHILSIDRGERHLAYYTLVDGKGNIIKQDTFNIIGNDRMKTNYHDKLAAIEKDRDSARKDWKKINNIKEMKEGYLSQVVHEIAKLVIEYNAIVVFEDLNFGFKRGRFKVEKQVYQKLEKMLIEKLNYLVFKDNEFDKTGGVLRAYQLTAPFETFKKMGKQTGIIYYVPAGFTSKICPVTGFVNQLYPKYESVSKSQEFFSKFDKICYNLDKGYFEFSFDYKNFGDKAAKGKWTIASFGSRLINFRNSDKNHNWDTREVYPTKELEKLLKDYSIEYGHGECIKAAICGESDKKFFAKLTSVLNTILQMRNSKTGTELDYLISPVADVNGNFFDSRQAPKNMPQDADANGAYHIGLKGLMLLGRIKNNQEGKKLNLVIKNEEYFEFVQNRNN

SEQ ID NO: 108 - protein, 1300 aa, Francisella novicida
MSIYQEFVNKYSLSKTLRFELIPQGKTLENIKARGLILDDEKRAKDYKKAKQIIDKYHQFFIEEILSSVCISEDLLQNYSDVYFKLKKSDDDNLQKDFKSAKDTIKKQISEYIKDSEKFKNLFNQNLIDAKKGQESDLILWLKQSKDNGIELFKANSDITDIDEALEIIKSFKGWTTYFKGFHENRKNVYSSNDIPTSIIYRIVDDNLPKFLENKAKYESLKDKAPEAINYEQIKKDLAEELTFDIDYKTSEVNQRVFSLDEVFEIANFNNYLNQSGITKFNTIIGGKFVNGENTKRKGINEYINLYSQQINDKTLKKYKMSVLFKQILSDTESKSFVIDKLEDDSDVVTTMQSFYEQIAAFKTVEEKSIKETLSLLFDDLKAQKLDLSKIYFKNDKSLTDLSQQVFDDYSVIGTAVLEYITQQIAPKNLDNPSKKEQELIAKKTEKAKYLSLETIKLALEEFNKHRDIDKQCRFEEILANFAAIPMIFDEIAQNKDNLAQISIKYQNQGKKDLLQASAEDDVKAIKDLLDQTNNLLHKLKIFHISQSEDKANILDKDEHFYLVFEECYFELANIVPLYNKIRNYITQKPYSDEKFKLNFENSTLANGWDKNKEPDNTAILFIKDDKYYLGVMNKKNNKIFDDKAIKENKGEGYKKIVYKLLPGANKMLPKVFFSAKSIKFYNPSEDILRIRNHSTHTKNGSPQKGYEKFEFNIEDCRKFIDFYKQSISKHPEWKDFGFRFSDTQRYNSIDEFYREVENQGYKLTFENISESYIDSVVNQGKLYLFQIYNKDFSAYSKGRPNLHTLYWKALFDERNLQDVVYKLNGEAELFYRKQSIPKKITHPAKEAIANKNKDNPKKESVFEYDLIKDKRFTEDKFFFHCPITINFKSSGANKFNDEINLLLKEKANDVHILSIARGERHLAYYTLVDGKGNIIKQDTFNIIGNDRMKTNYHDKLAAIEKDRDSARKDWKKINNIKEMKEGYLSQVVHEIAKLVIEYNAIVVFEDLNFGFKRGRFKVEKQVYQKLEKMLIEKLNYLVFKDNEFDKTGGVLRAYQLTAPFETFKKMGKQTGIIYYVPAGFTSKICPVTGFVNQLYPKYESVSKSQEFFSKFDKICYNLDKGYFEFSFDYKNFGDKAAKGKWTIASFGSRLINFRNSDKNHNWDTREVYPTKELEKLLKDYSIEYGHGECIKAAICGESDKKFFAKLTSVLNTILQMRNSKTGTELDYLISPVADVNGNFFDSRQAPKNMPQDADANGAYHIGLKGLMLLGRIKNNQEGKKLNLVIKNEEYFEFVQNRNN

SEQ ID NO: 109 - protein, 1300 aa, Francisella novicida
MSIYQEFVNKYSLSKTLRFELIPQGKTLENIKARGLILDDEKRAKDYKKAKQIIDKYHQFFIEEILSSVCISEDLLQNYSDVYFKLKKSDDDNLQKDFKSAKDTIKKQISEYIKDSEKFKNLFNQNLIDAKKGQESDLILWLKQSKDNGIELFKANSDITDIDEALEIIKSFKGWTTYFKGFHENRKNVYSSNDIPTSIIYRIVDDNLPKFLENKAKYESLKDKAPEAINYEQIKKDLAEELTFDIDYKTSEVNQRVFSLDEVFEIANFNNYLNQSGITKFNTIIGGKFVNGENTKRKGINEYINLYSQQINDKTLKKYKMSVLFKQILSDTESKSFVIDKLEDDSDVVTTMQSFYEQIAAFKTVEEKSIKETLSLLFDDLKAQKLDLSKIYFKNDKSLTDLSQQVFDDYSVIGTAVLEYITQQIAPKNLDNPSKKEQELIAKKTEKAKYLSLETIKLALEEFNKHRDIDKQCRFEEILANFAAIPMIFDEIAQNKDNLAQISIKYQNQGKKDLLQASAEDDVKAIKDLLDQTNNLLHKLKIFHISQSEDKANILDKDEHFYLVFEECYFELANIVPLYNKIRNYITQKPYSDEKFKLNFENSTLANGWDKNKEPDNTAILFIKDDKYYLGVMNKKNNKIFDDKAIKENKGEGYKKIVYKLLPGANKMLPKVFFSAKSIKFYNPSEDILRIRNHSTHTKNGSPQKGYEKFEFNIEDCRKFIDFYKQSISKHPEWKDFGFRFSDTQRYNSIDEFYREVENQGYKLTFENISESYIDSVVNQGKLYLFQIYNKDFSAYSKGRPNLHTLYWKALFDERNLQDVVYKLNGEAELFYRKQSIPKKITHPAKEAIANKNKDNPKKESVFEYDLIKDKRFTEDKFFFHCPITINFKSSGANKFNDEINLLLKEKANDVHILSIDRGERHLAYYTLVDGKGNIIKQDTFNIIGNDRMKTNYHDKLAAIEKDRDSARKDWKKINNIKEMKEGYLSQVVHEIAKLVIEYNAIVVFADLNFGFKRGRFKVEKQVYQKLEKMLIEKLNYLVFKDNEFDKTGGVLRAYQLTAPFETFKKMGKQTGIIYYVPAGFTSKICPVTGFVNQLYPKYESVSKSQEFFSKFDKICYNLDKGYFEFSFDYKNFGDKAAKGKWTIASFGSRLINFRNSDKNHNWDTREVYPTKELEKLLKDYSIEYGHGECIKAAICGESDKKFFAKLTSVLNTILQMRNSKTGTELDYLISPVADVNGNFFDSRQAPKNMPQDADANGAYHIGLKGLMLLGRIKNNQEGKKLNLVIKNEEYFEFVQNRNN

SEQ ID NO: 110 - protein, 1300 aa, Francisella novicida
MSIYQEFVNKYSLSKTLRFELIPQGKTLENIKARGLILDDEKRAKDYKKAKQIIDKYHQFFIEEILSSVCISEDLLQNYSDVYFKLKKSDDDNLQKDFKSAKDTIKKQISEYIKDSEKFKNLFNQNLIDAKKGQESDLILWLKQSKDNGIELFKANSDITDIDEALEIIKSFKGWTTYFKGFHENRKNVYSSNDIPTSIIYRIVDDNLPKFLENKAKYESLKDKAPEAINYEQIKKDLAEELTFDIDYKTSEVNQRVFSLDEVFEIANFNNYLNQSGITKFNTIIGGKFVNGENTKRKGINEYINLYSQQINDKTLKKYKMSVLFKQILSDTESKSFVIDKLEDDSDVVTTMQSFYEQIAAFKTVEEKSIKETLSLLFDDLKAQKLDLSKIYFKNDKSLTDLSQQVFDDYSVIGTAVLEYITQQIAPKNLDNPSKKEQELIAKKTEKAKYLSLETIKLALEEFNKHRDIDKQCRFEEILANFAAIPMIFDEIAQNKDNLAQISIKYQNQGKKDLLQASAEDDVKAIKDLLDQTNNLLHKLKIFHISQSEDKANILDKDEHFYLVFEECYFELANIVPLYNKIRNYITQKPYSDEKFKLNFENSTLANGWDKNKEPDNTAILFIKDDKYYLGVMNKKNNKIFDDKAIKENKGEGYKKIVYKLLPGANKMLPKVFFSAKSIKFYNPSEDILRIRNHSTHTKNGSPQKGYEKFEFNIEDCRKFIDFYKQSISKHPEWKDFGFRFSDTQRYNSIDEFYREVENQGYKLTFENISESYIDSVVNQGKLYLFQIYNKDFSAYSKGRPNLHTLYWKALFDERNLQDVVYKLNGEAELFYRKQSIPKKITHPAKEAIANKNKDNPKKESVFEYDLIKDKRFTEDKFFFHCPITINFKSSGANKFNDEINLLLKEKANDVHILSIDRGERHLAYYTLVDGKGNIIKQDTFNIIGNDRMKTNYHDKLAAIEKDRDSARKDWKKINNIKEMKEGYLSQVVHEIAKLVIEYNAIVVFEDLNFGFKRGRFKVEKQVYQKLEKMLIEKLNYLVFKDNEFDKTGGVLRAYQLTAPFETFKKMGKQTGIIYYVPAGFTSKICPVTGFVNQLYPKYESVSKSQEFFSKFDKICYNLDKGYFEFSFDYKNFGDKAAKGKWTIASFGSRLINFRNSDKNHNWDTREVYPTKELEKLLKDYSIEYGHGECIKAAICGESDKKFFAKLTSVLNTILQMRNSKTGTELDYLISPVADVNGNFFDSRQAPKNMPQDAAANGAYHIGLKGLMLLGRIKNNQEGKKLNLVIKNEEYFEFVQNRNN

SEQ ID NO: 111 - protein, 1300 aa, Francisella novicida
MSIYQEFVNKYSLSKTLRFELIPQGKTLENIKARGLILDDEKRAKDYKKAKQIIDKYHQFFIEEILSSVCISEDLLQNYSDVYFKLKKSDDDNLQKDFKSAKDTIKKQISEYIKDSEKFKNLFNQNLIDAKKGQESDLILWLKQSKDNGIELFKANSDITDIDEALEIIKSFKGWTTYFKGFHENRKNVYSSNDIPTSIIYRIVDDNLPKFLENKAKYESLKDKAPEAINYEQIKKDLAEELTFDIDYKTSEVNQRVFSLDEVFEIANFNNYLNQSGITKFNTIIGGKFVNGENTKRKGINEYINLYSQQINDKTLKKYKMSVLFKQILSDTESKSFVIDKLEDDSDVVTTMQSFYEQIAAFKTVEEKSIKETLSLLFDDLKAQKLDLSKIYFKNDKSLTDLSQQVFDDYSVIGTAVLEYITQQIAPKNLDNPSKKEQELIAKKTEKAKYLSLETIKLALEEFNKHRDIDKQCRFEEILANFAAIPMIFDEIAQNKDNLAQISIKYQNQGKKDLLQASAEDDVKAIKDLLDQTNNLLHKLKIFHISQSEDKANILDKDEHFYLVFEECYFELANIVPLYNKIRNYITQKPYSDEKFKLNFENSTLANGWDKNKEPDNTAILFIKDDKYYLGVMNKKNNKIFDDKAIKENKGEGYKKIVYKLLPGANKMLPKVFFSAKSIKFYNPSEDILRIRNHSTHTKNGSPQKGYEKFEFNIEDCRKFIDFYKQSISKHPEWKDFGFRFSDTQRYNSIDEFYREVENQGYKLTFENISESYIDSVVNQGKLYLFQIYNKDFSAYSKGRPNLHTLYWKALFDERNLQDVVYKLNGEAELFYRKQSIPKKITHPAKEAIANKNKDNPKKESVFEYDLIKDKRFTEDKFFFHCPITINFKSSGANKFNDEINLLLKEKANDVHILSIARGERHLAYYTLVDGKGNIIKQDTFNIIGNDRMKTNYHDKLAAIEKDRDSARKDWKKINNIKEMKEGYLSQVVHEIAKLVIEYNAIVVFADLNFGFKRGRFKVEKQVYQKLEKMLIEKLNYLVFKDNEFDKTGGVLRAYQLTAPFETFKKMGKQTGIIYYVPAGFTSKICPVTGFVNQLYPKYESVSKSQEFFSKFDKICYNLDKGYFEFSFDYKNFGDKAAKGKWTIASFGSRLINFRNSDKNHNWDTREVYPTKELEKLLKDYSIEYGHGECIKAAICGESDKKFFAKLTSVLNTILQMRNSKTGTELDYLISPVADVNGNFFDSRQAPKNMPQDADANGAYHIGLKGLMLLGRIKNNQEGKKLNLVIKNEEYFEFVQNRNN

SEQ ID NO: 112 - protein, 1300 aa, Francisella novicida
MSIYQEFVNKYSLSKTLRFELIPQGKTLENIKARGLILDDEKRAKDYKKAKQIIDKYHQFFIEEILSSVCISEDLLQNYSDVYFKLKKSDDDNLQKDFKSAKDTIKKQISEYIKDSEKFKNLFNQNLIDAKKGQESDLILWLKQSKDNGIELFKANSDITDIDEALEIIKSFKGWTTYFKGFHENRKNVYSSNDIPTSIIYRIVDDNLPKFLENKAKYESLKDKAPEAINYEQIKKDLAEELTFDIDYKTSEVNQRVFSLDEVFEIANFNNYLNQSGITKFNTIIGGKFVNGENTKRKGINEYINLYSQQINDKTLKKYKMSVLFKQILSDTESKSFVIDKLEDDSDVVTTMQSFYEQIAAFKTVEEKSIKETLSLLFDDLKAQKLDLSKIYFKNDKSLTDLSQQVFDDYSVIGTAVLEYITQQIAPKNLDNPSKKEQELIAKKTEKAKYLSLETIKLALEEFNKHRDIDKQCRFEEILANFAAIPMIFDEIAQNKDNLAQISIKYQNQGKKDLLQASAEDDVKAIKDLLDQTNNLLHKLKIFHISQSEDKANILDKDEHFYLVFEECYFELANIVPLYNKIRNYITQKPYSDEKFKLNFENSTLANGWDKNKEPDNTAILFIKDDKYYLGVMNKKNNKIFDDKAIKENKGEGYKKIVYKLLPGANKMLPKVFFSAKSIKFYNPSEDILRIRNHSTHTKNGSPQKGYEKFEFNIEDCRKFIDFYKQSISKHPEWKDFGFRFSDTQRYNSIDEFYREVENQGYKLTFENISESYIDSVVNQGKLYLFQIYNKDFSAYSKGRPNLHTLYWKALFDERNLQDVVYKLNGEAELFYRKQSIPKKITHPAKEAIANKNKDNPKKESVFEYDLIKDKRFTEDKFFFHCPITINFKSSGANKFNDEINLLLKEKANDVHILSIARGERHLAYYTLVDGKGNIIKQDTFNIIGNDRMKTNYHDKLAAIEKDRDSARKDWKKINNIKEMKEGYLSQVVHEIAKLVIEYNAIVVFEDLNFGFKRGRFKVEKQVYQKLEKMLIEKLNYLVFKDNEFDKTGGVLRAYQLTAPFETFKKMGKQTGIIYYVPAGFTSKICPVTGFVNQLYPKYESVSKSQEFFSKFDKICYNLDKGYFEFSFDYKNFGDKAAKGKWTIASFGSRLINFRNSDKNHNWDTREVYPTKELEKLLKDYSIEYGHGECIKAAICGESDKKFFAKLTSVLNTILQMRNSKTGTELDYLISPVADVNGNFFDSRQAPKNMPQDAAANGAYHIGLKGLMLLGRIKNNQEGKKLNLVIKNEEYFEFVQNRNN

SEQ ID NO: 113 - protein, 1300 aa, Francisella novicida
MSIYQEFVNKYSLSKTLRFELIPQGKTLENIKARGLILDDEKRAKDYKKAKQIIDKYHQFFIEEILSSVCISEDLLQNYSDVYFKLKKSDDDNLQKDFKSAKDTIKKQISEYIKDSEKFKNLFNQNLIDAKKGQESDLILWLKQSKDNGIELFKANSDITDIDEALEIIKSFKGWTTYFKGFHENRKNVYSSNDIPTSIIYRIVDDNLPKFLENKAKYESLKDKAPEAINYEQIKKDLAEELTFDIDYKTSEVNQRVFSLDEVFEIANFNNYLNQSGITKFNTIIGGKFVNGENTKRKGINEYINLYSQQINDKTLKKYKMSVLFKQILSDTESKSFVIDKLEDDSDVVTTMQSFYEQIAAFKTVEEKSIKETLSLLFDDLKAQKLDLSKIYFKNDKSLTDLSQQVFDDYSVIGTAVLEYITQQIAPKNLDNPSKKEQELIAKKTEKAKYLSLETIKLALEEFNKHRDIDKQCRFEEILANFAAIPMIFDEIAQNKDNLAQISIKYQNQGKKDLLQASAEDDVKAIKDLLDQTNNLLHKLKIFHISQSEDKANILDKDEHFYLVFEECYFELANIVPLYNKIRNYITQKPYSDEKFKLNFENSTLANGWDKNKEPDNTAILFIKDDKYYLGVMNKKNNKIFDDKAIKENKGEGYKKIVYKLLPGANKMLPKVFFSAKSIKFYNPSEDILRIRNHSTHTKNGSPQKGYEKFEFNIEDCRKFIDFYKQSISKHPEWKDFGFRFSDTQRYNSIDEFYREVENQGYKLTFENISESYIDSVVNQGKLYLFQIYNKDFSAYSKGRPNLHTLYWKALFDERNLQDVVYKLNGEAELFYRKQSIPKKITHPAKEAIANKNKDNPKKESVFEYDLIKDKRFTEDKFFFHCPITINFKSSGANKFNDEINLLLKEKANDVHILSIDRGERHLAYYTLVDGKGNIIKQDTFNIIGNDRMKTNYHDKLAAIEKDRDSARKDWKKINNIKEMKEGYLSQVVHEIAKLVIEYNAIVVFADLNFGFKRGRFKVEKQVYQKLEKMLIEKLNYLVFKDNEFDKTGGVLRAYQLTAPFETFKKMGKQTGIIYYVPAGFTSKICPVTGFVNQLYPKYESVSKSQEFFSKFDKICYNLDKGYFEFSFDYKNFGDKAAKGKWTIASFGSRLINFRNSDKNHNWDTREVYPTKELEKLLKDYSIEYGHGECIKAAICGESDKKFFAKLTSVLNTILQMRNSKTGTELDYLISPVADVNGNFFDSRQAPKNMPQDAAANGAYHIGLKGLMLLGRIKNNQEGKKLNLVIKNEEYFEFVQNRNN

SEQ ID NO: 114 - protein, 1300 aa, Francisella novicida
MSIYQEFVNKYSLSKTLRFELIPQGKTLENIKARGLILDDEKRAKDYKKAKQIIDKYHQFFIEEILSSVCISEDLLQNYSDVYFKLKKSDDDNLQKDFKSAKDTIKKQISEYIKDSEKFKNLFNQNLIDAKKGQESDLILWLKQSKDNGIELFKANSDITDIDEALEIIKSFKGWTTYFKGFHENRKNVYSSNDIPTSIIYRIVDDNLPKFLENKAKYESLKDKAPEAINYEQIKKDLAEELTFDIDYKTSEVNQRVFSLDEVFEIANFNNYLNQSGITKFNTIIGGKFVNGENTKRKGINEYINLYSQQINDKTLKKYKMSVLFKQILSDTESKSFVIDKLEDDSDVVTTMQSFYEQIAAFKTVEEKSIKETLSLLFDDLKAQKLDLSKIYFKNDKSLTDLSQQVFDDYSVIGTAVLEYITQQIAPKNLDNPSKKEQELIAKKTEKAKYLSLETIKLALEEFNKHRDIDKQCRFEEILANFAAIPMIFDEIAQNKDNLAQISIKYQNQGKKDLLQASAEDDVKAIKDLLDQTNNLLHKLKIFHISQSEDKANILDKDEHFYLVFEECYFELANIVPLYNKIRNYITQKPYSDEKFKLNFENSTLANGWDKNKEPDNTAILFIKDDKYYLGVMNKKNNKIFDDKAIKENKGEGYKKIVYKLLPGANKMLPKVFFSAKSIKFYNPSEDILRIRNHSTHTKNGSPQKGYEKFEFNIEDCRKFIDFYKQSISKHPEWKDFGFRFSDTQRYNSIDEFYREVENQGYKLTFENISESYIDSVVNQGKLYLFQIYNKDFSAYSKGRPNLHTLYWKALFDERNLQDVVYKLNGEAELFYRKQSIPKKITHPAKEAIANKNKDNPKKESVFEYDLIKDKRFTEDKFFFHCPITINFKSSGANKFNDEINLLLKEKANDVHILSIARGERHLAYYTLVDGKGNIIKQDTFNIIGNDRMKTNYHDKLAAIEKDRDSARKDWKKINNIKEMKEGYLSQVVHEIAKLVIEYNAIVVFADLNFGFKRGRFKVEKQVYQKLEKMLIEKLNYLVFKDNEFDKTGGVLRAYQLTAPFETFKKMGKQTGIIYYVPAGFTSKICPVTGFVNQLYPKYESVSKSQEFFSKFDKICYNLDKGYFEFSFDYKNFGDKAAKGKWTIASFGSRLINFRNSDKNHNWDTREVYPTKELEKLLKDYSIEYGHGECIKAAICGESDKKFFAKLTSVLNTILQMRNSKTGTELDYLISPVADVNGNFFDSRQAPKNMPQDAAANGAYHIGLKGLMLLGRIKNNQEGKKLNLVIKNEEYFEFVQNRNN

SEQ ID NO: 115 - protein, 1052 aa, Staphylococcus aureus
KRNYILGLDIGITSVGYGIIDYETRDVIDAGVRLFKEANVENNEGRRSKRGARRLKRRRRHRIQRVKKLLFDYNLLTDHSELSGINPYEARVKGLSQKLSEEEFSAALLHLAKRRGVHNVNEVEEDTGNELSTKEQISRNSKALEEKYVAELQLERLKKDGEVRGSINRFKTSDYVKEAKQLLKVQKAYHQLDQSFIDTYIDLLETRRTYYEGPGEGSPFGWKDIKEWYEMLMGHCTYFPEELRSVKYAYNADLYNALNDLNNLVITRDENEKLEYYEKFQIIENVFKQKKKPTLKQIAKEILVNEEDIKGYRVTSTGKPEFTNLKVYHDIKDITARKEIIENAELLDQIAKILTIYQSSEDIQEELTNLNSELTQEEIEQISNLKGYTGTHNLSLKAINLILDELWHTNDNQIAIFNRLKLVPKKVDLSQQKEIPTTLVDDFILSPVVKRSFIQSIKVINAIIKKYGLPNDIIIELAREKNSKDAQKMINEMQKRNRQTNERIEEIIRTTGKENAKYLIEKIKLHDMQEGKCLYSLEAIPLEDLLNNPFNYEVDHIIPRSVSFDNSFNNKVLVKQEENSKKGNRTPFQYLSSSDSKISYETFKKHILNLAKGKGRISKTKKEYLLEERDINRFSVQKDFINRNLVDTRYATRGLMNLLRSYFRVNNLDVKVKSINGGFTSFLRRKWKFKKERNKGYKHHAEDALIIANADFIFKEWKKLDKAKKVMENQMFEEKQAESMPEIETEQEYKEIFITPHQIKHIKDFKDYKYSHRVDKKPNRELINDTLYSTRKDDKGNTLIVNNLNGLYDKDNDKLKKLINKSPEKLLMYHHDPQTYQKLKLIMEQYGDEKNPLYKYYEETGNYLTKYSKKDNGPVIKKIKYYGNKLNAHLDITDDYPNSRNKVVKLSLKPYRFDVYLDNGVYKFVTVKNLDVIKKENYYEVNSKCYEEAKKLKKISNQAEFIASFYNNDLIKINGELYRVIGVNNDLLNRIEVNMIDITYREYLENMNDKRPPRIIKTIASKTQSIKKYSTDILGNLYEVKSKKHPQIIKKG

SEQ ID NO: 116 - protein, 1052 aa, Staphylococcus aureus
KRNYILGLDIGITSVGYGIIDYETRDVIDAGVRLFKEANVENNEGRRSKRGARRLKRRRRHRIQRVKKLLFDYNLLTDHSELSGINPYEARVKGLSQKLSEEEFSAALLHLAKRRGVHNVNEVEEDTGNELSTKEQISRNSKALEEKYVAELQLERLKKDGEVRGSINRFKTSDYVKEAKQLLKVQKAYHQLDQSFIDTYIDLLETRRTYYEGPGEGSPFGWKDIKEWYEMLMGHCTYFPEELRSVKYAYNADLYNALNDLNNLVITRDENEKLEYYEKFQIIENVFKQKKKPTLKQIAKEILVNEEDIKGYRVTSTGKPEFTNLKVYHDIKDITARKEIIENAELLDQIAKILTIYQSSEDIQEELTNLNSELTQEEIEQISNLKGYTGTHNLSLKAINLILDELWHTNDNQIAIFNRLKLVPKKVDLSQQKEIPTTLVDDFILSPVVKRSFIQSIKVINAIIKKYGLPNDIIIELAREKNSKDAQKMINEMQKRNRQTNERIEEIIRTTGKENAKYLIEKIKLHDMQEGKCLYSLEAIPLEDLLNNPFNYEVDHIIPRSVSFDNSFNNKVLVKQEEASKKGNRTPFQYLSSSDSKISYETFKKHILNLAKGKGRISKTKKEYLLEERDINRFSVQKDFINRNLVDTRYATRGLMNLLRSYFRVNNLDVKVKSINGGFTSFLRRKWKFKKERNKGYKHHAEDALIIANADFIFKEWKKLDKAKKVMENQMFEEKQAESMPEIETEQEYKEIFITPHQIKHIKDFKDYKYSHRVDKKPNRELINDTLYSTRKDDKGNTLIVNNLNGLYDKDNDKLKKLINKSPEKLLMYHHDPQTYQKLKLIMEQYGDEKNPLYKYYEETGNYLTKYSKKDNGPVIKKIKYYGNKLNAHLDITDDYPNSRNKVVKLSLKPYRFDVYLDNGVYKFVTVKNLDVIKKENYYEVNSKCYEEAKKLKKISNQAEFIASFYNNDLIKINGELYRVIGVNNDLLNRIEVNMIDITYREYLENMNDKRPPRIIKTIASKTQSIKKYSTDILGNLYEVKSKKHPQIIKKG

SEQ ID NO: 117 - protein, 1052 aa, Staphylococcus aureus
KRNYILGLDIGITSVGYGIIDYETRDVIDAGVRLFKEANVENNEGRRSKRGARRLKRRRRHRIQRVKKLLFDYNLLTDHSELSGINPYEARVKGLSQKLSEEEFSAALLHLAKRRGVHNVNEVEEDTGNELSTKEQISRNSKALEEKYVAELQLERLKKDGEVRGSINRFKTSDYVKEAKQLLKVQKAYHQLDQSFIDTYIDLLETRRTYYEGPGEGSPFGWKDIKEWYEMLMGHCTYFPEELRSVKYAYNADLYNALNDLNNLVITRDENEKLEYYEKFQIIENVFKQKKKPTLKQIAKEILVNEEDIKGYRVTSTGKPEFTNLKVYHDIKDITARKEIIENAELLDQIAKILTIYQSSEDIQEELTNLNSELTQEEIEQISNLKGYTGTHNLSLKAINLILDELWHTNDNQIAIFNRLKLVPKKVDLSQQKEIPTTLVDDFILSPVVKRSFIQSIKVINAIIKKYGLPNDIIIELAREKNSKDAQKMINEMQKRNRQTNERIEEIIRTTGKENAKYLIEKIKLHDMQEGKCLYSLEAIPLEDLLNNPFNYEVDHIIPRSVSFDNSFNNKVLVKQEEASKKGNRTPFQYLSSSDSKISYETFKKHILNLAKGKGRISKTKKEYLLEERDINRFSVQKDFINRNLVDTRYATRGLMNLLRSYFRVNNLDVKVKSINGGFTSFLRRKWKFKKERNKGYKHHAEDALIIANADFIFKEWKKLDKAKKVMENQMFEEKQAESMPEIETEQEYKEIFITPHQIKHIKDFKDYKYSHRVDKKPNRKLINDTLYSTRKDDKGNTLIVNNLNGLYDKDNDKLKKLINKSPEKLLMYHHDPQTYQKLKLIMEQYGDEKNPLYKYYEETGNYLTKYSKKDNGPVIKKIKYYGNKLNAHLDITDDYPNSRNKVVKLSLKPYRFDVYLDNGVYKFVTVKNLDVIKKENYYEVNSKCYEEAKKLKKISNQAEFIASFYKNDLIKINGELYRVIGVNNDLLNRIEVNMIDITYREYLENMNDKRPPHIIKTIASKTQSIKKYSTDILGNLYEVKSKKHPQIIKKG

SEQ ID NO: 118 - protein, 1129 aa, Alicyclobacillus acidiphilus
MAVKSMKVKLRLDNMPEIRAGLWKLHTEVNAGVRYYTEWLSLLRQENLYRRSPNGDGEQECYKTAEECKAELLERLRARQVENGHCGPAGSDDELLQLARQLYELLVPQAIGAKGDAQQIARKFLSPLADKDAVGGLGIAKAGNKPRWVRMREAGEPGWEEEKAKAEARKSTDRTADVLRALADFGLKPLMRVYTDSDMSSVQWKPLRKGQAVRTWDRDMFQQAIERMMSWESWNQRVGEAYAKLVEQKSRFEQKNFVGQEHLVQLVNQLQQDMKEASHGLESKEQTAHYLTGRALRGSDKVFEKWEKLDPDAPFDLYDTEIKNVQRRNTRRFGSHDLFAKLAEPKYQALWREDASFLTRYAVYNSIVRKLNHAKMFATFTLPDATAHPIWTRFDKLGGNLHQYTFLFNEFGEGRHAIRFQKLLTVEDGVAKEVDDVTVPISMSAQLDDLLPRDPHELVALYFQDYGAEQHLAGEFGGAKIQYRRDQLNHLHARRGARDVYLNLSVRVQSQSEARGERRPPYAAVFRLVGDNHRAFVHFDKLSDYLAEHPDDGKLGSEGLLSGLRVMSVDLGLRTSASISVFRVARKDELKPNSEGRVPFCFPIEGNENLVAVHERSQLLKLPGETESKDLRAIREERQRTLRQLRTQLAYLRLLVRCGSEDVGRRERSWAKLIEQPMDANQMTPDWREAFEDELQKLKSLYGICGDREWTEAVYESVRRVWRHMGKQVRDWRKDVRSGERPKIRGYQKDVVGGNSIEQIEYLERQYKFLKSWSFFGKVSGQVIRAEKGSRFAITLREHIDHAKEDRLKKLADRIIMEALGYVYALDDERGKGKWVAKYPPCQLILLEELSEYQFNNDRPPSENNQLMQWSHRGVFQELLNQAQVHDLLVGTMYAAFSSRFDARTGAPGIRCRRVPARCAREQNPEPFPWWLNKFVAEHKLDGCPLRADDLIPTGEGEFFVSPFSAEEGDFHQIHADLNAAQNLQRRLWSDFDISQIRLRCDWGEVDGEPVLIPRTTGKRTADSYGNKVFYTKTGVTYYERERGKKRRKVFAQEELSEEEAELLVEADEAREKSVVLMRDPSGIINRGDWTRQKEFWSMVNQRIEGYLVKQIRSRVRLQESACENTGDI

SEQ ID NO: 119 - DNA, 47 bp, Artificial Sequence
  Description of Artificial Sequence: Synthetic oligonucleotide
gggaaataagagagaaaagaagagtaagaagaaatataagagccacc

SEQ ID NO: 120 - DNA, 101 bp, Artificial Sequence
  Description of Artificial Sequence: Synthetic polynucleotide
gctggagcctcggtggccatgcttcttgccccttgggcctccccccagcccctcctccccttcctgcacccgtacccccgtggtctttgaataaagtctga

SEQ ID NO: 121 - DNA, 3420 bp, Artificial Sequence
  Description of Artificial Sequence: Synthetic polynucleotide
atggccccaaagaagaagcggaaggtcggtatccacggagtcccagcagccgccaccagatccttcatcctgaagatcgagcccaacgaggaagtgaagaaaggcctctggaaaacccacgaggtgctgaaccacggaatcgcctactacatgaatatcctgaagctgatccggcaagaggccatctacgagcaccacgagcaggaccccaagaatcccaagaaggtgtccaaggccgagatccaggccgagctgtgggatttcgtgctgaagatgcagaagtgcaacagcttcacacacgaggtggacaaggacgaggtgttcaacatcctgagagagctgtacgaggaactggtgcccagcagcgtggaaaagaagggcgaagccaaccagctgagcaacaagtttctgtaccctctggtggaccccaacagccagtctggaaagggaacagccagcagcggcagaaagcccagatggtacaacctgaagattgccggcgatccctcctgggaagaagagaagaagaagtgggaagaagataagaaaaaggacccgctggccaagatcctgggcaagctggctgagtacggactgatccctctgttcatcccctacaccgacagcaacgagcccatcgtgaaagaaatcaagtggatggaaaagtcccggaaccagagcgtgcggcggctggataaggacatgttcattcaggccctggaacggttcctgagctgggagagctggaacctgaaagtgaaagaggaatacgagaaggtcgagaaagagtacaagaccctggaagagaggatcaaagaggacatccaggctctgaaggctctggaacagtatgagaaagagcggcaagaacagctgctgcgggacaccctgaacaccaacgagtaccggctgagcaagagaggccttagaggctggcgggaaatcatccagaaatggctgaaaatggacgagaacgagccctccgagaagtacctggaagtgttcaaggactaccagcggaagcaccctagagaggccggcgattacagcgtgtacgagttcctgtccaagaaagagaaccacttcatctggcggaatcaccctgagtacccctacctgtacgccaccttctgcgagatcgacaagaaaaagaaggacgccaagcagcaggccaccttcacactggccgatcctatcaatcaccctctgtgggtccgattcgaggaaagaagcggcagcaacctgaacaagtacagaatcctgaccgagcagctgcacaccgagaagctgaagaaaaagctgacagtgcagctggaccggctgatctaccctacagaatctggcggctgggaagagaagggcaaagtggacattgtgctgctgcccagccggcagttctacaaccagatcttcctggacatcgaggaaaagggcaagcacgccttcacctacaaggatgagagcatcaagttccctctgaagggcacactcggcggagccagagtgcagttcgacagagatcacctgagaagataccctcacaaggtggaaagcggcaacgtgggcagaatctacttcaacatgaccgtgaacatcgagcctacagagtccccagtgtccaagtctctgaagatccaccgggacgacttccccaaggtggtcaacttcaagcccaaagaactgaccgagtggatcaaggacagcaagggcaagaaactgaagtccggcatcgagtccctggaaatcggcctgagagtgatgagcatcgacctgggacagagacaggccgctgccgcctctattttcgaggtggtggatcagaagcccgacatcgaaggcaagctgtttttcccaatcaagggcaccgagctgtatgccgtgcacagagccagcttcaacatcaagctgcccggcgagacactggtcaagagcagagaagtgctgcggaaggccagagaggacaatctgaaactgatgaaccagaagctcaacttcctgcggaacgtgctgcacttccagcagttcgaggacatcaccgagagagagaagcgggtcaccaagtggatcagcagacaagagaacagcgacgtgcccctggtgtaccaggatgagctgatccagatccgcgagctgatgtacaagccttacaaggactgggtcgccttcctgaagcagctccacaagagactggaagtcgagatcggcaaagaagtgaagcactggcggaagtccctgagcgacggaagaaagggcctgtacggcatctccctgaagaacatcgacgagatcgatcggacccggaagttcctgctgagatggtccctgaggcctaccgaacctggcgaagtgcgtagactggaacccggccagagattcgccatcgaccagctgaatcacctgaacgccctgaaagaagatcggctgaagaagatggccaacaccatcatcatgcacgccctgggctactgctacgacgtgcggaagaagaaatggcaggctaagaaccccgcctgccagatcatcctgttcgaggatctgagcaactacaacccctacgaggaaaggtcccgcttcgagaacagcaagctcatgaagtggtccagacgcgagatccccagacaggttgcactgcagggcgagatctatggcctgcaagtgggagaagtgggcgctcagttcagcagcagattccacgccaagacaggcagccctggcatcagatgtagcgtcgtgaccaaagagaagctgcaggacaatcggttcttcaagaatctgcagagagagggcagactgaccctggacaaaatcgccgtgctgaaagagggcgatctgtacccagacaaaggcggcgagaagttcatcagcctgagcaaggatcggaagtgcgtgaccacacacgccgacatcaacgccgctcagaacctgcagaagcggttctggacaagaacccacggcttctacaaggtgtactgcaaggcctaccaggtggacggccagaccgtgtacatccctgagagcaaggaccagaagcagaagatcatcgaagagttcggcgagggctacttcattctgaaggacggggtgtacgaatgggtcaacgccggcaagctgaaaatcaagaagggcagctccaagcagagcagcagcgagctggtggatagcgacatcctgaaagacagcttcgacctggcctccgagctgaaaggcgaaaagctgatgctgtacagggaccccagcggcaatgtgttccccagcgacaaatggatggccgctggcgtgttcttcggaaagctggaacgcatcctgatcagcaagctgaccaaccagtactccatcagcaccatcgaggacgacagcagcaagcagtctatgaaaaggccggcggccacgaaaaaggccggccaggcaaaaaagaaaaag

SEQ ID NO: 122 - protein, 1112 aa, Bacillus sp.
MAIRSIKLKMKTNSGTDSIYLRKALWRTHQLINEGIAYYMNLLTLYRQEAIGDKTKEAYQAELINIIRNQQRNNGSSEEHGSDQEILALLRQLYELIIPSSIGESGDANQLGNKFLYPLVDPNSQSGKGTSNAGRKPRWKRLKEEGNPDWELEKKKDEERKAKDPTVKIFDNLNKYGLLPLFPLFTNIQKDIEWLPLGKRQSVRKWDKDMFIQAIERLLSWESWNRRVADEYKQLKEKTESYYKEHLTGGEEWIEKIRKFEKERNMELEKNAFAPNDGYFITSRQIRGWDRVYEKWSKLPESASPEELWKVVAEQQNKMSEGFGDPKVFSFLANRENRDIWRGHSERIYHIAAYNGLQKKLSRTKEQATFTLPDAIEHPLWIRYESPGGTNLNLFKLEEKQKKNYYVTLSKIIWPSEEKWIEKENIEIPLAPSIQFNRQIKLKQHVKGKQEISFSDYSSRISLDGVLGGSRIQFNRKYIKNHKELLGEGDIGPVFFNLVVDVAPLQETRNGRLQSPIGKALKVISSDFSKVIDYKPKELMDWMNTGSASNSFGVASLLEGMRVMSIDMGQRTSASVSIFEVVKELPKDQEQKLFYSINDTELFAIHKRSFLLNLPGEVVTKNNKQQRQERRKKRQFVRSQIRMLANVLRLETKKTPDERKKAIHKLMEIVQSYDSWTASQKEVWEKELNLLTNMAAFNDEIWKESLVELHHRIEPYVGQIVSKWRKGLSEGRKNLAGISMWNIDELEDTRRLLISWSKRSRTPGEANRIETDEPFGSSLLQHIQNVKDDRLKQMANLIIMTALGFKYDKEEKDRYKRWKETYPACQIILFENLNRYLFNLDRSRRENSRLMKWAHRSIPRTVSMQGEMFGLQVGDVRSEYSSRFHAKTGAPGIRCHALTEEDLKAGSNTLKRLIEDGFINESELAYLKKGDIIPSQGGELFVTLSKRYKKDSDNNELTVIHADINAAQNLQKRFWQQNSEVYRVPCQLARMGEDKLYIPKSQTETIKKYFGKGSFVKNNTEQEVYKWEKSEKMKIKTDTTFDLQDLDGFEDISKTIELAQEQQKKYLTMFRDPSGYFFNNETWRPQKEYWSIVNNIIKSCLKKKILSNKVEL

SEQ ID NO: 123 - protein, 1108 aa, Bacillus thermoamylovorans
MATRSFILKIEPNEEVKKGLWKTHEVLNHGIAYYMNILKLIRQEAIYEHHEQDPKNPKKVSKAEIQAELWDFVLKMQKCNSFTHEVDKDVVFNILRELYEELVPSSVEKKGEANQLSNKFLYPLVDPNSQSGKGTASSGRKPRWYNLKIAGDPSWEEEKKKWEEDKKKDPLAKILGKLAEYGLIPLFIPFTDSNEPIVKEIKWMEKSRNQSVRRLDKDMFIQALERFLSWESWNLKVKEEYEKVEKEHKTLEERIKEDIQAFKSLEQYEKERQEQLLRDTLNTNEYRLSKRGLRGWREIIQKWLKMDENEPSEKYLEVFKDYQRKHPREAGDYSVYEFLSKKENHFIWRNHPEYPYLYATFCEIDKKKKDAKQQATFTLADPINHPLWVRFEERSGSNLNKYRILTEQLHTEKLKKKLTVQLDRLIYPTESGGWEEKGKVDIVLLPSRQFYNQIFLDIEEKGKHAFTYKDESIKFPLKGTLGGARVQFDRDHLRRYPHKVESGNVGRIYFNMTVNIEPTESPVSKSLKIHRDDFPKFVNFKPKELTEWIKDSKGKKLKSGIESLEIGLRVMSIDLGQRQAAAASIFEVVDQKPDIEGKLFFPIKGTELYAVHRASFNIKLPGETLVKSREVLRKAREDNLKLMNQKLNFLRNVLHFQQFEDITEREKRVTKWISRQENSDVPLVYQDELIQIRELMYKPYKDWVAFLKQLHKRLEVEIGKEVKHWRKSLSDGRKGLYGISLKNIDEIDRTRKFLLRWSLRPTEPGEVRRLEPGQRFAIDQLNHLNALKEDRLKKMANTIIMHALGYCYDVRKKKWQAKNPACQIILFEDLSNYNPYEERSRFENSKLMKWSRREIPRQVALQGEIYGLQVGEVGAQFSSRFHAKTGSPGIRCSVVTKEKLQDNRFFKNLQREGRLTLDKIAVLKEGDLYPDKGGEKFISLSKDRKLVTTHADINAAQNLQKRFWTRTHGFYKVYCKAYQVDGQTVYIPESKDQKQKIIEEFGEGYFILKDGVYEWGNAGKLKIKKGSSKQSSSELVDSDILKDSFDLASELKGEKLMLYRDPSGNVFPSDKWMAAGVFFGKLERILISKLTNQYSISTIEDDSSKQSM

SEQ ID NO: 124 - protein, 1302 aa, Artificial Sequence
  Description of Artificial Sequence: Synthetic polypeptide
MQTKKTHLHLISAKASRKYRRTIACLSDTAKKDLERRKQSGAADPAQELSCLKTIKFKLEVPEGSKLPSFDRISQIYNALETIEKGSLSYLLFALILSGFRIFPNSSAAKTFASSSCYKNDQFASQIKEIFGEMVKNFIPSELESILKKGRRKNNKDWTEENIKRVLNSEFGRKNSEGSSALFDSFLSKFSQELFRKFDSWNEVNKKYLEAAELLDSMLASYGPFDSVCKMIGDSDSRNSLPDKSTIAFTNNAEITVDIESSVMPYMAIAALLREYRQSKSKAAPVAYVQSHLTTTNGNGLSWFFKFGLDLIRKAPVSSKQSTSDGSKSLQELFSVPDDKLDGLKFIKEACEALPEASLLCGEKGELLGYQDFRTSFAGHIDSWVANYVNRLFELIELVNQLPESIKLPSILTQKNHNLVASLGLQEAEVSHSLELFEGLVKNVRQTLKKLAGIDISSSPNEQDIKEFYAFSDVLNRLGSIRNQIENAVQTAKKDKIDLESAIEWKEWKKLKKLPKLNGLGGGVPKQQELLDKALESVKQIRHYQRIDFERVIQWAVNEHCLETVPKFLVDAEKKKINKESSTDFAAKENAVRFLLEGIGAAARGKTDSVSKAAYNWFVVNNFLAKKDLNRYFINCQGCIYKPPYSKRRSLAFALRSDNKDTIEVVWEKFETFYKEISKEIEKFNIFSQEFQTFLHLENLRMKLLLRRIQKPIPAEIAFFSLPQEYYDSLPPNVAFLALNQEITPSEYITQFNLYSSFLNGNLILLRRSRSYLRAKFSWVGNSKLIYAAKEARLWKIPNAYWKSDEWKMILDSNVLVFDKAGNVLPAPTLKKVCEREGDLRLFYPLLRQLPHDWCYRNPFVKSVGREKNVIEVNKEGEPKVASALPGSLFRLIGPAPFKSLLDDCFFNPLDKDLRECMLIVDQEISQKVEAQKVEASLESCTYSIAVPIRYHLEEPKVSNQFENVLAIDQGEAGLAYAVFSLKSIGEAETKPIAVGTIRIPSIRRLIHSVSTYRKKKQRLQNFKQNYDSTAFIMRENVTGDVCAKIVGLMKEFNAFPVLEYDVKNLESGSRQLSAVYKAVNSHFLYFKEPGRDALRKQLWYGGDSWTIDGIEIVTRERKEDGKEGVEKIVPLKVFPGRSVSARFTSKTCSCCGRNVFDWLFTEKKAKTNKKFNVNSKGELTTADGVIQLFEADRSKGPKFYARRKERTPLTKPIAKGSYSLEEIERRVRTNLRRAPKSKQSRDTSQSQYFCVYKDCALHFSGMQADENAAINIGRRFLTALRKNRRSDFPSNVKISDRLLDN

SEQ ID NO: 125 - protein, 1218 aa, Artificial Sequence
  Description of Artificial Sequence: Synthetic polypeptide
MTKHSIPLHAFRNSGADARKWKGRIALLAKRGKETMRTLQFPLEMSEPEAAAINTTPFAVAYNAIEGTGKGTLFDYWAKLHLAGFRFFPSGGAATIFRQQAVFEDASWNAAFCQQSGKDWPWLVPSKLYERFTKAPREVAKKDGSKKSIEFTQENVANESHVSLVGASITDKTPEDQKEFFLKMAGALAEKFDSWKSANEDRIVAMKVIDEFLKSEGLHLPSLENIAVKCSVETKPDNATVAWHDAPMSGVQNLAIGVFATCASRIDNIYDLNGGKLSKLIQESATTPNVTALSWLFGKGLEYFRTTDIDTIMQDFNIPASAKESIKPLVESAQAIPTMTVLGKKNYAPFRPNFGGKIDSWIANYASRLMLLNDILEQIEPGFELPQALLDNETLMSGIDMTGDELKELIEAVYAWVDAAKQGLATLLGRGGNVDDAVQTFEQFSAMMDTLNGTLNTISARYVRAVEMAGKDEARLEKLIECKFDIPKWCKSVPKLVGISGGLPKVEEEIKVMNAAFKDVRARMFVRFEEIAAYVASKGAGMDVYDALEKRELEQIKKLKSAVPERAHIQAYRAVLHRIGRAVQNCSEKTKQLFSSKVIEMGVFKNPSHLNNFIFNQKGAIYRSPFDRSRHAPYQLHADKLLKNDWLELLAEISATLMASESTEQMEDALRLERTRLQLQLSGLPDWEYPASLAKPDIEVEIQTALKMQLAKDTVTSDVLQRAFNLYSSVLSGLTFKLLRRSFSLKMRFSVADTTQLIYVPKVCDWAIPKQYLQAEGEIGIAARVVTESSPAKMVTEVEMKEPKALGHFMQQAPHDWYFDASLGGTQVAGRIVEKGKEVGKERKLVGYRMRGNSAYKTVLDKSLVGNTELSQCSMIIEIPYTQTVDADFRAQVQAGLPKVSINLPVKETITASNKDEQMLFDRFVAIDLGERGLGYAVFDAKTLELQESGHRPIKAITNLLNRTHHYEQRPNQRQKFQAKFNVNLSELRENTVGDVCHQINRICAYYNAFPVLEYMVPDRLDKQLKSVYESVTNRYIWSSTDAHKSARVQFWLGGETWEHPYLKSAKDKKPLVLSPGRGASGKGTSQTCSCCGRNPFDLIKDMKPRAKIAVVDGKAKLENSELKLFERNLESKDDMLARRHRNERAGMEQPLTPGNYTVDEIKALLRANLRRAPKNRRTKDTTVSEYHCVFSDCGKTMHADENAAVNIGGKFIADIEK

SEQ ID NO: 126 - protein, 1252 aa, Oleiphilus sp.
MTKLRHRQKKLTHDWAGSKKREVLGSNGKLQNPLLMPVKKGQVTEFRKAFSAYARATKGEMTDGRKNMFTHSFEPFKTKPSLHQCELADKAYQSLHSYLPGSLAHFLLSAHALGFRIFSKSGEATAFQASSKIEAYESKLASELACVDLSIQNLTISTLFNALTTSVRGKGEETSADPLIARFYTLLTGKPLSRDTQGPERDLAEVISRKIASSFGTWKEMTANPLQSLQFFEEELHALDANVSLSPAFDVLIKMNDLQGDLKNRTIVFDPDAPVFEYNAEDPADIIIKLTARYAKEAVIKNQNVGNYVKNAITTTNANGLGWLLNKGLSLLPVSTDDELLEFIGVERSHPSCHALIELIAQLEAPELFEKNVFSDTRSEVQGMIDSAVSNHIARLSSSRNSLSMDSEELERLIKSFQIHTPHCSLFIGAQSLSQQLESLPEALQSGVNSADILLGSTQYMLTNSLVEESIATYQRTLNRINYLSGVAGQINGAIKRKAIDGEKIHLPAAWSELISLPFIGQPVIDVESDLAHLKNQYQTLSNEFDTLISALQKNFDLNFNKALLNRTQHFEAMCRSTKKNALSKPEIVSYRDLLARLTSCLYRGSLVLRRAGIEVLKKHKIFESNSELREHVHERKHFVFVSPLDRKAKKLLRLTDSRPDLLHVIDEILQHDNLENKDRESLWLVRSGYLLAGLPDQLSSSFINLPIITQKGDRRLIDLIQYDQINRDAFVMLVTSAFKSNLSGLQYRANKQSFVVTRTLSPYLGSKLVYVPKDKDWLVPSQMFEGRFADILQSDYMVWKDAGRLCVIDTAKHLSNIKKSVFSSEEVLAFLRELPHRTFIQTEVRGLGVNVDGIAFNNGDIPSLKTFSNCVQVKVSRTNTSLVQTLNRWFEGGKVSPPSIQFERAYYKKDDQIHEDAAKRKIRFQMPATELVHASDDAGWTPSYLLGIDPGEYGMGLSLVSINNGEVLDSGFIHINSLINFASKKSNHQTKVVPRQQYKSPYANYLEQSKDSAAGDIAHILDRLIYKLNALPVFEALSGNSQSAADQVWTKVLSFYTWGDNDAQNSIRKQHWFGASHWDIKGMLRQPPTEKKPKPYIAFPGSQVSSYGNSQRCSCCGRNPIEQLREMAKDTSIKELKIRNSEIQLFDGTIKLFNPDPSTVIERRRHNLGPSRIPVADRTFKNISPSSLEFKELITIVSRSIRHSPEFIAKKRGIGSEYFCAYSDCNSSLNSEANAAANVAQKFQKQLFFEL

SEQ ID NO: 127 - protein, 767 aa, Artificial Sequence
  Description of Artificial Sequence: Synthetic polypeptide
MAQASSTPAVSPRPRPRYREERTLVRKLLPRPGQSKQEFRENVKKLRKAFLQFNADVSGVCQWAIQFRPRYGKPAEPTETFWKFFLEPETSLPPNDSRSPEFRRLQAFEAAAGINGAAALDDPAFTNELRDSILAVASRPKTKEAQRLFSRLKDYQPAHRMILAKVAAEWIESRYRRAHQNWERNYEEWKKEKQEWEQNHPELTPEIREAFNQIFQQLEVKEKRVRICPAARLLQNKDNCQYAGKNKHSVLCNQFNEFKKNHLQGKAIKFFYKDAEKYLRCGLQSLKPNVQGPFREDWNKYLRYMNLKEETLRGKNGGRLPHCKNLGQECEFNPHTALCKQYQQQLSSRPDLVQHDELYRKWRREYWREPRKPVFRYPSVKRHSIAKIFGENYFQADFKNSVVGLRLDSMPAGQYLEFAFAPWPRNYRPQPGETEISSVHLHFVGTRPRIGFRFRVPHKRSRFDCTQEELDELRSRTFPRKAQDQKFLEAARKRLLETFPGNAEQELRLLAVDLGTDSARAAFFIGKTFQQAFPLKIVKIEKLYEQWPNQKQAGDRRDASSKQPRPGLSRDHVGRHLQKMRAQASEIAQKRQELTGTPAPETTTDQAAKKATLQPFDLRGLTVHTARMIRDWARLNARQIIQLAEENQVDLIVLESLRGFRPPGYENLDQEKKRRVAFFAHGRIRRKVTEKAVERGMRVVTVPYLASSKVCAECRKKQKDNKQWEKNKKRGLFKCEGCGSQAQVDENAARVLGRVFWGEIELPTAIP

SEQ ID NO: 128 - protein, 870 aa, Artificial Sequence
  Description of Artificial Sequence: Synthetic polypeptide
MKVHEIPRSQLLKIKQYEGSFVEWYRDLQEDRKKFASLLFRWAAFGYAAREDDGATYISPSQALLERRLLLGDAEDVAIKFLDVLFKGGAPSSSCYSLFYEDFALRDKAKYSGAKREFIEGLATMPLDKIIERIRQDEQLSKIPAEEWLILGAEYSPEEIWEQVAPRIVNVDRSLGKQLRERLGIKCRRPHDAGYCKILMEVVARQLRSHNETYHEYLNQTHEMKTKVANNLTNEFDLVCEFAEVLEEKNYGLGWYVLWQGVKQALKEQKKPTKIQIAVDQLRQPKFAGLLTAKWRALKGAYDTWKLKKRLEKRKAFPYMPNWDNDYQIPVGLTGLGVFTLEVKRTEVVVDLKEHGKLFCSHSHYFGDLTAEKHPSRYHLKFRHKLKLRKRDSRVEPTIGPWIEAALREITIQKKPNGVFYLGLPYALSHGIDNFQIAKRFFSAAKPDKEVINGLPSEMVVGAADLNLSNIVAPVKARIGKGLEGPLHALDYGYGELIDGPKILTPDGPRCGELISLKRDIVEIKSAIKEFKACQREGLTMSEETTTWLSEVESPSDSPRCMIQSRIADTSRRLNSFKYQMNKEGYQDLAEALRLLDAMDSYNSLLESYQRMHLSPGEQSPKEAKFDTKRASFRDLLRRRVAHTIVEYFDDCDIVFFEDLDGPSDSDSRNNALVKLLSPRTLLLYIRQALEKRGIGMVEVAKDGTSQNNPISGHVGWRNKQNKSEIYFYEDKELLVMDADEVGAMNILCRGLNHSVCPYSFVTKAPEKKNDEKKEGDYGKRVKRFLKDRYGSSNVRFLVASMGFVTVTTKRPKDALVGKRLYYHGGELVTHDLHNRMKDEIKYLVEKEVLARRVSLSDSTIKSYKSFAHV

SEQ ID NO: 129 - protein, 1093 aa, Artificial Sequence
  Description of Artificial Sequence: Synthetic polypeptide
MSNKEKNASETRKAYTTKMIPRSHDRMKLLGNFMDYLMDGTPIFFELWNQFGGGIDRDIISGTANKDKISDDLLLAVNWFKVMPINSKPQGVSPSNLANLFQQYSGSEPDIQAQEYFASNFDTEKHQWKDMRVEYERLLAELQLSRSDMHHDLKLMYKEKCIGLSLSTAHYITSVMFGTGAKNNRQTKHQFYSKVIQLLEESTQINSVEQLASIILKAGDCDSYRKLRIRCSRKGATPSILKIVQDYELGTNHDDEVNVPSLIANLKEKLGRFEYECEWKCMEKIKAFLASKVGPYYLGSYSAMLENALSPIKGMTTKNCKFVLKQIDAKNDIKYENEPFGKIVEGFFDSPYFESDTNVKWVLHPHHIGESNIKTLWEDLNAIHSKYEEDIASLSEDKKEKRIKVYQGDVCQTINTYCEEVGKEAKTPLVQLLRYLYSRKDDIAVDKIIDGITFLSKKHKVEKQKINPVIQKYPSFNFGNNSKLLGKIISPKDKLKHNLKCNRNQVDNYIWIEIKVLNTKTMRWEKHHYALSSTRFLEEVYYPATSENPPDALAARFRTKTNGYEGKPALSAEQIEQIRSAPVGLRKVKKRQMRLEAARQQNLLPRYTWGKDFNINICKRGNNFEVTLATKVKKKKEKNYKVVLGYDANIVRKNTYAAIEAHANGDGVIDYNDLPVKPIESGFVTVESQVRDKSYDQLSYNGVKLLYCKPHVESRRSFLEKYRNGTMKDNRGNNIQIDFMKDFEAIADDETSLYYFNMKYCKLLQSSIRNHSSQAKEYREEIFELLRDGKLSVLKLSSLSNLSFVMFKVAKSLIGTYFGHLLKKPKNSKSDVKAPPITDEDKQKADPEMFALRLALEEKRLNKVKSKKEVIANKIVAKALELRDKYGPVLIKGENISDTTKKGKKSSTNSFLMDWLARGVANKVKEMVMMHQGLEFVEVNPNFTSHQDPFVHKNPENTFRARYSRCTPSELTEKNRKEILSFLSDKPSKRPTNAYYNEGAMAFLATYGLKKNDVLGVSLEKFKQIMANILHQRSEDQLLFPSRGGMFYLATYKLDADATSVNWNGKQFWVCNADLVAAYNVGLVDIQKDFKKK

SEQ ID NO: 130 - protein, 1054 aa, Artificial Sequence
  Description of Artificial Sequence: Synthetic polypeptide
MSSAIKSYKSVLRPNERKNQLLKSTIQCLEDGSAFFFKMLQGLFGGITPEIVRFSTEQEKQQQDIALWCAVNWFRPVSQDSLTHTIASDNLVEKFEEYYGGTASDAIKQYFSASIGESYYWNDCRQQYYDLCRELGVEVSDLTHDLEILCREKCLAVATESNQNNSIISVLFGTGEKEDRSVKLRITKKILEAISNLKEIPKNVAPIQEIILNVAKATKETFRQVYAGNLGAPSTLEKFIAKDGQKEFDLKKLQTDLKKVIRGKSKERDWCCQEELRSYVEQNTIQYDLWAWGEMFNKAHTALKIKSTRNYNFAKQRLEQFKEIQSLNNLLVVKKLNDFFDSEFFSGEETYTICVHHLGGKDLSKLYKAWEDDPADPENAIVVLCDDLKNNFKKEPIRNILRYIFTIRQECSAQDILAAAKYNQQLDRYKSQKANPSVLGNQGFTWTNAVILPEKAQRNDRPNSLDLRIWLYLKLRHPDGRWKKHHIPFYDTRFFQEIYAAGNSPVDTCQFRTPRFGYHLPKLTDQTAIRVNKKHVKAAKTEARIRLAIQQGTLPVSNLKITEISATINSKGQVRIPVKFDVGRQKGTLQIGDRFCGYDQNQTASHAYSLWEVVKEGQYHKELGCFVRFISSGDIVSITENRGNQFDQLSYEGLAYPQYADWRKKASKFVSLWQITKKNKKKEIVTVEAKEKFDAICKYQPRLYKFNKEYAYLLRDIVRGKSLVELQQIRQEIFRFIEQDCGVTRLGSLSLSTLETVKAVKGIIYSYFSTALNASKNNPISDEQRKEFDPELFALLEKLELIRTRKKKQKVERIANSLIQTCLENNIKFIRGEGDLSTTNNATKKKANSRSMDWLARGVFNKIRQLAPMHNITLFGCGSLYTSHQDPLVHRNPDKAMKCRWAAIPVKDIGDWVLRKLSQNLRAKNIGTGEYYHQGVKEFLSHYELQDLEEELLKWRSDRKSNIPCWVLQNRLAEKLGNKEAVVYIPVRGGRIYFATHKVATGAVSIVFDQKQVWVCNADHVAAANIALTVKGIGEQSSDEENPDGSRIKLQLTS

SEQ ID NO: 131 - DNA, 4092 bp, Artificial Sequence
  Description of Artificial Sequence: Synthetic polynucleotide
gccaccatggccccaaagaagaagcggaaggtcggtatccacggagtcccagcagccgccaccagatccttcatcctgaagatcgagcccaacgaggaagtgaagaaaggcctctggaaaacccacgaggtgctgaaccacggaatcgcctactacatgaatatcctgaagctgatccggcaagaggccatctacgagcaccacgagcaggaccccaagaatcccaagaaggtgtccaaggccgagatccaggccgagctgtgggatttcgtgctgaagatgcagaagtgcaacagcttcacacacgaggtggacaaggacgaggtgttcaacatcctgagagagctgtacgaggaactggtgcccagcagcgtggaaaagaagggcgaagccaaccagctgagcaacaagtttctgtaccctctggtggaccccaacagccagtctggaaagggaacagccagcagcggcagaaagcccagatggtacaacctgaagattgccggcgatcccggaggctctggaggaagctccgaagtcgagttttcccatgagtactggatgagacacgcattgactctcgcaaagagggctcgagatgaacgcgaggtgcccgtgggggcagtactcgtgctcaacaatcgcgtaatcggcgaaggttggaatagggcaatcggactccacgaccccactgcacatgcggaaatcatggcccttcgacagggagggcttgtgatgcagaattatcgactttatgatgcgacgctgtacgtcacgtttgaaccttgcgtaatgtgcgcgggagctatgattcactcccgcattggacgagttgtattcggtgttcgcaacgccaagacgggtgccgcaggttcactgatggacgtgctgcatcatccaggcatgaaccaccgggtagaaatcacagaaggcatattggcggacgaatgtgcggcgctgttgtgtcgtttttttcgcatgcccaggcgggtctttaacgcccagaaaaaagcacaatcctctactgacggctcttctggatctgaaacacctggcacaagcgagagcgccacccctgagagctctggctcctgggaagaagagaagaagaagtgggaagaagataagaaaaaggacccgctggccaagatcctgggcaagctggctgagtacggactgatccctctgttcatcccctacaccgacagcaacgagcccatcgtgaaagaaatcaagtggatggaaaagtcccggaaccagagcgtgcggcggctggataaggacatgttcattcaggccctggaacggttcctgagctgggagagctggaacctgaaagtgaaagaggaatacgagaaggtcgagaaagagtacaagaccctggaagagaggatcaaagaggacatccaggctctgaaggctctggaacagtatgagaaagagcggcaagaacagctgctgcgggacaccctgaacaccaacgagtaccggctgagcaagagaggccttagaggctggcgggaaatcatccagaaatggctgaaaatggacgagaacgagccctccgagaagtacctggaagtgttcaaggactaccagcggaagcaccctagagaggccggcgattacagcgtgtacgagttcctgtccaagaaagagaaccacttcatctggcggaatcaccctgagtacccctacctgtacgccaccttctgcgagatcgacaagaaaaagaaggacgccaagcagcaggccaccttcacactggccgatcctatcaatcaccctctgtgggtccgattcgaggaaagaagcggcagcaacctgaacaagtacagaatcctgaccgagcagctgcacaccgagaagctgaagaaaaagctgacagtgcagctggaccggctgatctaccctacagaatctggcggctgggaagagaagggcaaagtggacattgtgctgctgcccagccggcagttctacaaccagatcttcctggacatcgaggaaaagggcaagcacgccttcacctacaaggatgagagcatcaagttccctctgaagggcacactcggcggagccagagtgcagttcgacagagatcacctgagaagataccctcacaaggtggaaagcggcaacgtgggcagaatctacttcaacatgaccgtgaacatcgagcctacagagtccccagtgtccaagtctctgaagatccaccgggacgacttccccaaggtggtcaacttcaagcccaaagaactgaccgagtggatcaaggacagcaagggcaagaaactgaagtccggcatcgagtccctggaaatcggcctgagagtgatgagcatcgacctgggacagagacaggccgctgccgcctctattttcgaggtggtggatcagaagcccgacatcgaaggcaagctgtttttcccaatcaagggcaccgagctgtatgccgtgcacagagccagcttcaacatcaagctgcccggcgagacactggtcaagagcagagaagtgctgcggaaggccagagaggacaatctgaaactgatgaaccagaagctcaacttcctgcggaacgtgctgcacttccagcagttcgaggacatcaccgagagagagaagcgggtcaccaagtggatcagcagacaagagaacagcgacgtgcccctggtgtaccaggatgagctgatccagatccgcgagctgatgtacaagccttacaaggactgggtcgccttcctgaagcagctccacaagagactggaagtcgagatcggcaaagaagtgaagcactggcggaagtccctgagcgacggaagaaagggcctgtacggcatctccctgaagaacatcgacgagatcgatcggacccggaagttcctgctgagatggtccctgaggcctaccgaacctggcgaagtgcgtagactggaacccggccagagattcgccatcgaccagctgaatcacctgaacgccctgaaagaagatcggctgaagaagatggccaacaccatcatcatgcacgccctgggctactgctacgacgtgcggaagaagaaatggcaggctaagaaccccgcctgccagatcatcctgttcgaggatctgagcaactacaacccctacgaggaaaggtcccgcttcgagaacagcaagctcatgaagtggtccagacgcgagatccccagacaggttgcactgcagggcgagatctatggcctgcaagtgggagaagtgggcgctcagttcagcagcagattccacgccaagacaggcagccctggcatcagatgtagcgtcgtgaccaaagagaagctgcaggacaatcggttcttcaagaatctgcagagagagggcagactgaccctggacaaaatcgccgtgctgaaagagggcgatctgtacccagacaaaggcggcgagaagttcatcagcctgagcaaggatcggaagtgcgtgaccacacacgccgacatcaacgccgctcagaacctgcagaagcggttctggacaagaacccacggcttctacaaggtgtactgcaaggcctaccaggtggacggccagaccgtgtacatccctgagagcaaggaccagaagcagaagatcatcgaagagttcggcgagggctacttcattctgaaggacggggtgtacgaatgggtcaacgccggcaagctgaaaatcaagaagggcagctccaagcagagcagcagcgagctggtggatagcgacatcctgaaagacagcttcgacctggcctccgagctgaaaggcgaaaagctgatgctgtacagggaccccagcggcaatgtgttccccagcgacaaatggatggccgctggcgtgttcttcggaaagctggaacgcatcctgatcagcaagctgaccaaccagtactccatcagcaccatcgaggacgacagcagcaagcagtctatgaaaaggccggcggccacgaaaaaggccggccaggcaaaaaagaaaaagggatcctacccatacgatgttccagattacgcttatccctacgacgtgcctgattatgcatacccatatgatgtccccgactatgcctaa

SEQ ID NO: 132 - protein, 1361 aa, Artificial Sequence
  Description of Artificial Sequence: Synthetic polypeptide
MAPKKKRKVGIHGVPAAATRSFILKIEPNEEVKKGLWKTHEVLNHGIAYYMNILKLIRQEAIYEHHEQDPKNPKKVSKAEIQAELWDFVLKMQKCNSFTHEVDKDEVFNILRELYEELVPSSVEKKGEANQLSNKFLYPLVDPNSQSGKGTASSGRKPRWYNLKIAGDPGGSGGSSEVEFSHEYWMRHALTLAKRARDEREVPVGAVLVLNNRVIGEGWNRAIGLHDPTAHAEIMALRQGGLVMQNYRLYDATLYVTFEPCVMCAGAMIHSRIGRVVFGVRNAKTGAAGSLMDVLHHPGMNHRVEITEGILADECAALLCRFFRMPRRVFNAQKKAQSSTDGSSGSETPGTSESATPESSGSWEEEKKKWEEDKKKDPLAKILGKLAEYGLIPLFIPYTDSNEPIVKEIKWMEKSRNQSVRRLDKDMFIQALERFLSWESWNLKVKEEYEKVEKEYKTLEERIKEDIQALKALEQYEKERQEQLLRDTLNTNEYRLSKRGLRGWREIIQKWLKMDENEPSEKYLEVFKDYQRKHPREAGDYSVYEFLSKKENHFIWRNHPEYPYLYATFCEIDKKKKDAKQQATFTLADPINHPLWVRFEERSGSNLNKYRILTEQLHTEKLKKKLTVQLDRLIYPTESGGWEEKGKVDIVLLPSRQFYNQIFLDIEEKGKHAFTYKDESIKFPLKGTLGGARVQFDRDHLRRYPHKVESGNVGRIYFNMTVNIEPTESPVSKSLKIHRDDFPKVVNFKPKELTEWIKDSKGKKLKSGIESLEIGLRVMSIDLGQRQAAAASIFEVVDQKPDIEGKLFFPIKGTELYAVHRASFNIKLPGETLVKSREVLRKAREDNLKLMNQKLNFLRNVLHFQQFEDITEREKRVTKWISRQENSDVPLVYQDELIQIRELMYKPYKDWVAFLKQLHKRLEVEIGKEVKHWRKSLSDGRKGLYGISLKNIDEIDRTRKFLLRWSLRPTEPGEVRRLEPGQRFAIDQLNHLNALKEDRLKKMANTIIMHALGYCYDVRKKKWQAKNPACQIILFEDLSNYNPYEERSRFENSKLMKWSRREIPRQVALQGEIYGLQVGEVGAQFSSRFHAKTGSPGIRCSVVTKEKLQDNRFFKNLQREGRLTLDKIAVLKEGDLYPDKGGEKFISLSKDRKCVTTHADINAAQNLQKRFWTRTHGFYKVYCKAYQVDGQTVYIPESKDQKQKIIEEFGEGYFILKDGVYEWVNAGKLKIKKGSSKQSSSELVDSDILKDSFDLASELKGEKLMLYRDPSGNVFPSDKWMAAGVFFGKLERILISKLTNQYSISTIEDDSSKQSMKRPAATKKAGQAKKKKGSYPYDVPDYAYPYDVPDYAYPYDVPDYA

SEQ ID NO: 133 - DNA, 4092 bp, Artificial Sequence
  Description of Artificial Sequence: Synthetic polynucleotide
gccaccatggccccaaagaagaagcggaaggtcggtatccacggagtcccagcagccgccaccagatccttcatcctgaagatcgagcccaacgaggaagtgaagaaaggcctctggaaaacccacgaggtgctgaaccacggaatcgcctactacatgaatatcctgaagctgatccggcaagaggccatctacgagcaccacgagcaggaccccaagaatcccaagaaggtgtccaaggccgagatccaggccgagctgtgggatttcgtgctgaagatgcagaagtgcaacagcttcacacacgaggtggacaaggacgaggtgttcaacatcctgagagagctgtacgaggaactggtgcccagcagcgtggaaaagaagggcgaagccaaccagctgagcaacaagtttctgtaccctctggtggaccccaacagccagtctggaaagggaacagccagcagcggcagaaagcccagatggtacaacctgaagattgccggcgatccctcctgggaagaagagaagaagaagtgggaagaagataagaaaaaggacccgctggccaagatcctgggcaagctggctgagtacggactgatccctctgttcatcccctacaccgacagcaacgagcccatcgtgaaagaaatcaagtggatggaaaagtcccggaaccagagcgtgcggcggctggataaggacatgttcattcaggccctggaacggttcctgagctgggagagctggaacctgaaagtgaaagaggaatacgagaaggtcgagaaagagtacaagaccctggaagagaggatcaaaggaggctctggaggaagctccgaagtcgagttttcccatgagtactggatgagacacgcattgactctcgcaaagagggctcgagatgaacgcgaggtgcccgtgggggcagtactcgtgctcaacaatcgcgtaatcggcgaaggttggaatagggcaatcggactccacgaccccactgcacatgcggaaatcatggcccttcgacagggagggcttgtgatgcagaattatcgactttatgatgcgacgctgtacgtcacgtttgaaccttgcgtaatgtgcgcgggagctatgattcactcccgcattggacgagttgtattcggtgttcgcaacgccaagacgggtgccgcaggttcactgatggacgtgctgcatcatccaggcatgaaccaccgggtagaaatcacagaaggcatattggcggacgaatgtgcggcgctgttgtgtcgtttttttcgcatgcccaggcgggtctttaacgcccagaaaaaagcacaatcctctactgacggctcttctggatctgaaacacctggcacaagcgagagcgccacccctgagagctctggcgaggacatccaggctctgaaggctctggaacagtatgagaaagagcggcaagaacagctgctgcgggacaccctgaacaccaacgagtaccggctgagcaagagaggccttagaggctggcgggaaatcatccagaaatggctgaaaatggacgagaacgagccctccgagaagtacctggaagtgttcaaggactaccagcggaagcaccctagagaggccggcgattacagcgtgtacgagttcctgtccaagaaagagaaccacttcatctggcggaatcaccctgagtacccctacctgtacgccaccttctgcgagatcgacaagaaaaagaaggacgccaagcagcaggccaccttcacactggccgatcctatcaatcaccctctgtgggtccgattcgaggaaagaagcggcagcaacctgaacaagtacagaatcctgaccgagcagctgcacaccgagaagctgaagaaaaagctgacagtgcagctggaccggctgatctaccctacagaatctggcggctgggaagagaagggcaaagtggacattgtgctgctgcccagccggcagttctacaaccagatcttcctggacatcgaggaaaagggcaagcacgccttcacctacaaggatgagagcatcaagttccctctgaagggcacactcggcggagccagagtgcagttcgacagagatcacctgagaagataccctcacaaggtggaaagcggcaacgtgggcagaatctacttcaacatgaccgtgaacatcgagcctacagagtccccagtgtccaagtctctgaagatccaccgggacgacttccccaaggtggtcaacttcaagcccaaagaactgaccgagtggatcaaggacagcaagggcaagaaactgaagtccggcatcgagtccctggaaatcggcctgagagtgatgagcatcgacctgggacagagacaggccgctgccgcctctattttcgaggtggtggatcagaagcccgacatcgaaggcaagctgtttttcccaatcaagggcaccgagctgtatgccgtgcacagagccagcttcaacatcaagctgcccggcgagacactggtcaagagcagagaagtgctgcggaaggccagagaggacaatctgaaactgatgaaccagaagctcaacttcctgcggaacgtgctgcacttccagcagttcgaggacatcaccgagagagagaagcgggtcaccaagtggatcagcagacaagagaacagcgacgtgcccctggtgtaccaggatgagctgatccagatccgcgagctgatgtacaagccttacaaggactgggtcgccttcctgaagcagctccacaagagactggaagtcgagatcggcaaagaagtgaagcactggcggaagtccctgagcgacggaagaaagggcctgtacggcatctccctgaagaacatcgacgagatcgatcggacccggaagttcctgctgagatggtccctgaggcctaccgaacctggcgaagtgcgtagactggaacccggccagagattcgccatcgaccagctgaatcacctgaacgccctgaaagaagatcggctgaagaagatggccaacaccatcatcatgcacgccctgggctactgctacgacgtgcggaagaagaaatggcaggctaagaaccccgcctgccagatcatcctgttcgaggatctgagcaactacaacccctacgaggaaaggtcccgcttcgagaacagcaagctcatgaagtggtccagacgcgagatccccagacaggttgcactgcagggcgagatctatggcctgcaagtgggagaagtgggcgctcagttcagcagcagattccacgccaagacaggcagccctggcatcagatgtagcgtcgtgaccaaagagaagctgcaggacaatcggttcttcaagaatctgcagagagagggcagactgaccctggacaaaatcgccgtgctgaaagagggcgatctgtacccagacaaaggcggcgagaagttcatcagcctgagcaaggatcggaagtgcgtgaccacacacgccgacatcaacgccgctcagaacctgcagaagcggttctggacaagaacccacggcttctacaaggtgtactgcaaggcctaccaggtggacggccagaccgtgtacatccctgagagcaaggaccagaagcagaagatcatcgaagagttcggcgagggctacttcattctgaaggacggggtgtacgaatgggtcaacgccggcaagctgaaaatcaagaagggcagctccaagcagagcagcagcgagctggtggatagcgacatcctgaaagacagcttcgacctggcctccgagctgaaaggcgaaaagctgatgctgtacagggaccccagcggcaatgtgttccccagcgacaaatggatggccgctggcgtgttcttcggaaagctggaacgcatcctgatcagcaagctgaccaaccagtactccatcagcaccatcgaggacgacagcagcaagcagtctatgaaaaggccggcggccacgaaaaaggccggccaggcaaaaaagaaaaagggatcctacccatacgatgttccagattacgcttatccctacgacgtgcctgattatgcatacccatatgatgtccccgactatgcctaa

SEQ ID NO: 134 - protein, 1361 aa, Artificial Sequence
  Description of Artificial Sequence: Synthetic polypeptide
MAPKKKRKVGIHGVPAAATRSFILKIEPNEEVKKGLWKTHEVLNHGIAYYMNILKLIRQEAIYEHHEQDPKNPKKVSKAEIQAELWDFVLKMQKCNSFTHEVDKDEVFNILRELYEELVPSSVEKKGEANQLSNKFLYPLVDPNSQSGKGTASSGRKPRWYNLKIAGDPSWEEEKKKWEEDKKKDPLAKILGKLAEYGLIPLFIPYTDSNEPIVKEIKWMEKSRNQSVRRLDKDMFIQALERFLSWESWNLKVKEEYEKVEKEYKTLEERIKGGSGGSSEVEFSHEYWMRHALTLAKRARDEREVPVGAVLVLNNRVIGEGWNRAIGLHDPTAHAEIMALRQGGLVMQNYRLYDATLYVTFEPCVMCAGAMIHSRIGRVVFGVRNAKTGAAGSLMDVLHHPGMNHRVEITEGILADECAALLCRFFRMPRRVFNAQKKAQSSTDGSSGSETPGTSESATPESSGEDIQALKALEQYEKERQEQLLRDTLNTNEYRLSKRGLRGWREIIQKWLKMDENEPSEKYLEVFKDYQRKHPREAGDYSVYEFLSKKENHFIWRNHPEYPYLYATFCEIDKKKKDAKQQATFTLADPINHPLWVRFEERSGSNLNKYRILTEQLHTEKLKKKLTVQLDRLIYPTESGGWEEKGKVDIVLLPSRQFYNQIFLDIEEKGKHAFTYKDESIKFPLKGTLGGARVQFDRDHLRRYPHKVESGNVGRIYFNMTVNIEPTESPVSKSLKIHRDDFPKVVNFKPKELTEWIKDSKGKKLKSGIESLEIGLRVMSIDLGQRQAAAASIFEVVDQKPDIEGKLFFPIKGTELYAVHRASFNIKLPGETLVKSREVLRKAREDNLKLMNQKLNFLRNVLHFQQFEDITEREKRVTKWISRQENSDVPLVYQDELIQIRELMYKPYKDWVAFLKQLHKRLEVEIGKEVKHWRKSLSDGRKGLYGISLKNIDEIDRTRKFLLRWSLRPTEPGEVRRLEPGQRFAIDQLNHLNALKEDRLKKMANTIIMHALGYCYDVRKKKWQAKNPACQIILFEDLSNYNPYEERSRFENSKLMKWSRREIPRQVALQGEIYGLQVGEVGAQFSSRFHAKTGSPGIRCSVVTKEKLQDNRFFKNLQREGRLTLDKIAVLKEGDLYPDKGGEKFISLSKDRKCVTTHADINAAQNLQKRFWTRTHGFYKVYCKAYQVDGQTVYIPESKDQKQKIIEEFGEGYFILKDGVYEWVNAGKLKIKKGSSKQSSSELVDSDILKDSFDLASELKGEKLMLYRDPSGNVFPSDKWMAAGVFFGKLERILISKLTNQYSISTIEDDSSKQSMKRPAATKKAGQAKKKKGSYPYDVPDYAYPYDVPDYAYPYDVPDYA

SEQ ID NO: 135 - DNA, 4092 bp, Artificial Sequence
  Description of Artificial Sequence: Synthetic polynucleotide
gccaccatggccccaaagaagaagcggaaggtcggtatccacggagtcccagcagccgccaccagatccttcatcctgaagatcgagcccaacgaggaagtgaagaaaggcctctggaaaacccacgaggtgctgaaccacggaatcgcctactacatgaatatcctgaagctgatccggcaagaggccatctacgagcaccacgagcaggaccccaagaatcccaagaaggtgtccaaggccgagatccaggccgagctgtgggatttcgtgctgaagatgcagaagtgcaacagcttcacacacgaggtggacaaggacgaggtgttcaacatcctgagagagctgtacgaggaactggtgcccagcagcgtggaaaagaagggcgaagccaaccagctgagcaacaagtttctgtaccctctggtggaccccaacagccagtctggaaagggaacagccagcagcggcagaaagcccagatggtacaacctgaagattgccggcgatccctcctgggaagaagagaagaagaagtgggaagaagataagaaaaaggacccgctggccaagatcctgggcaagctggctgagtacggactgatccctctgttcatcccctacaccgacagcaacgagcccatcgtgaaagaaatcaagtggatggaaaagtcccggaaccagagcgtgcggcggctggataaggacatgttcattcaggccctggaacggttcctgagctgggagagctggaacctgaaagtgaaagaggaatacgagaaggtcgagaaagagtacaagaccctggaagagaggatcaaagaggacatccaggctctgaaggctctggaacagtatgagaaagagcggcaagaacagctgctgcgggacaccctgaacaccaacgagtaccggctgagcaagagaggccttagaggctggcgggaaatcatccagaaatggctgaaaatggacggaggctctggaggaagctccgaagtcgagttttcccatgagtactggatgagacacgcattgactctcgcaaagagggctcgagatgaacgcgaggtgcccgtgggggcagtactcgtgctcaacaatcgcgtaatcggcgaaggttggaatagggcaatcggactccacgaccccactgcacatgcggaaatcatggcccttcgacagggagggcttgtgatgcagaattatcgactttatgatgcgacgctgtacgtcacgtttgaaccttgcgtaatgtgcgcgggagctatgattcactcccgcattggacgagttgtattcggtgttcgcaacgccaagacgggtgccgcaggttcactgatggacgtgctgcatcatccaggcatgaaccaccgggtagaaatcacagaaggcatattggcggacgaatgtgcggcgctgttgtgtcgtttttttcgcatgcccaggcgggtctttaacgcccagaaaaaagcacaatcctctactgacggctcttctggatctgaaacacctggcacaagcgagagcgccacccctgagagctctggcgagaacgagccctccgagaagtacctggaagtgttcaaggactaccagcggaagcaccctagagaggccggcgattacagcgtgtacgagttcctgtccaagaaagagaaccacttcatctggcggaatcaccctgagtacccctacctgtacgccaccttctgcgagatcgacaagaaaaagaaggacgccaagcagcaggccaccttcacactggccgatcctatcaatcaccctctgtgggtccgattcgaggaaagaagcggcagcaacctgaacaagtacagaatcctgaccgagcagctgcacaccgagaagctgaagaaaaagctgacagtgcagctggaccggctgatctaccctacagaatctggcggctgggaagagaagggcaaagtggacattgtgctgctgcccagccggcagttctacaaccagatcttcctggacatcgaggaaaagggcaagcacgccttcacctacaaggatgagagcatcaagttccctctgaagggcacactcggcggagccagagtgcagttcgacagagatcacctgagaagataccctcacaaggtggaaagcggcaacgtgggcagaatctacttcaacatgaccgtgaacatcgagcctacagagtccccagtgtccaagtctctgaagatccaccgggacgacttccccaaggtggtcaacttcaagcccaaagaactgaccgagtggatcaaggacagcaagggcaagaaactgaagtccggcatcgagtccctggaaatcggcctgagagtgatgagcatcgacctgggacagagacaggccgctgccgcctctattttcgaggtggtggatcagaagcccgacatcgaaggcaagctgtttttcccaatcaagggcaccgagctgtatgccgtgcacagagccagcttcaacatcaagctgcccggcgagacactggtcaagagcagagaagtgctgcggaaggccagagaggacaatctgaaactgatgaaccagaagctcaacttcctgcggaacgtgctgcacttccagcagttcgaggacatcaccgagagagagaagcgggtcaccaagtggatcagcagacaagagaacagcgacgtgcccctggtgtaccaggatgagctgatccagatccgcgagctgatgtacaagccttacaaggactgggtcgccttcctgaagcagctccacaagagactggaagtcgagatcggcaaagaagtgaagcactggcggaagtccctgagcgacggaagaaagggcctgtacggcatctccctgaagaacatcgacgagatcgatcggacccggaagttcctgctgagatggtccctgaggcctaccgaacctggcgaagtgcgtagactggaacccggccagagattcgccatcgaccagctgaatcacctgaacgccctgaaagaagatcggctgaagaagatggccaacaccatcatcatgcacgccctgggctactgctacgacgtgcggaagaagaaatggcaggctaagaaccccgcctgccagatcatcctgttcgaggatctgagcaactacaacccctacgaggaaaggtcccgcttcgagaacagcaagctcatgaagtggtccagacgcgagatccccagacaggttgcactgcagggcgagatctatggcctgcaagtgggagaagtgggcgctcagttcagcagcagattccacgccaagacaggcagccctggcatcagatgtagcgtcgtgaccaaagagaagctgcaggacaatcggttcttcaagaatctgcagagagagggcagactgaccctggacaaaatcgccgtgctgaaagagggcgatctgtacccagacaaaggcggcgagaagttcatcagcctgagcaaggatcggaagtgcgtgaccacacacgccgacatcaacgccgctcagaacctgcagaagcggttctggacaagaacccacggcttctacaaggtgtactgcaaggcctaccaggtggacggccagaccgtgtacatccctgagagcaaggaccagaagcagaagatcatcgaagagttcggcgagggctacttcattctgaaggacggggtgtacgaatgggtcaacgccggcaagctgaaaatcaagaagggcagctccaagcagagcagcagcgagctggtggatagcgacatcctgaaagacagcttcgacctggcctccgagctgaaaggcgaaaagctgatgctgtacagggaccccagcggcaatgtgttccccagcgacaaatggatggccgctggcgtgttcttcggaaagctggaacgcatcctgatcagcaagctgaccaaccagtactccatcagcaccatcgaggacgacagcagcaagcagtctatgaaaaggccggcggccacgaaaaaggccggccaggcaaaaaagaaaaagggatcctacccatacgatgttccagattacgcttatccctacgacgtgcctgattatgcatacccatatgatgtccccgactatgcctaa

SEQ ID NO: 136 - protein, 1361 aa, Artificial Sequence
  Description of Artificial Sequence: Synthetic polypeptide
MAPKKKRKVGIHGVPAAATRSFILKIEPNEEVKKGLWKTHEVLNHGIAYYMNILKLIRQEAIYEHHEQDPKNPKKVSKAEIQAELWDFVLKMQKCNSFTHEVDKDEVFNILRELYEELVPSSVEKKGEANQLSNKFLYPLVDPNSQSGKGTASSGRKPRWYNLKIAGDPSWEEEKKKWEEDKKKDPLAKILGKLAEYGLIPLFIPYTDSNEPIVKEIKWMEKSRNQSVRRLDKDMFIQALERFLSWESWNLKVKEEYEKVEKEYKTLEERIKEDIQALKALEQYEKERQEQLLRDTLNTNEYRLSKRGLRGWREIIQKWLKMDGGSGGSSEVEFSHEYWMRHALTLAKRARDEREVPVGAVLVLNNRVIGEGWNRAIGLHDPTAHAEIMALRQGGLVMQNYRLYDATLYVTFEPCVMCAGAMIHSRIGRVVFGVRNAKTGAAGSLMDVLHHPGMNHRVEITEGILADECAALLCRFFRMPRRVFNAQKKAQSSTDGSSGSETPGTSESATPESSGENEPSEKYLEVFKDYQRKHPREAGDYSVYEFLSKKENHFIWRNHPEYPYLYATFCEIDKKKKDAKQQATFTLADPINHPLWVRFEERSGSNLNKYRILTEQLHTEKLKKKLTVQLDRLIYPTESGGWEEKGKVDIVLLPSRQFYNQIFLDIEEKGKHAFTYKDESIKFPLKGTLGGARVQFDRDHLRRYPHKVESGNVGRIYFNMTVNIEPTESPVSKSLKIHRDDFPKVVNFKPKELTEWIKDSKGKKLKSGIESLEIGLRVMSIDLGQRQAAAASIFEVVDQKPDIEGKLFFPIKGTELYAVHRASFNIKLPGETLVKSREVLRKAREDNLKLMNQKLNFLRNVLHFQQFEDITEREKRVTKWISRQENSDVPLVYQDELIQIRELMYKPYKDWVAFLKQLHKRLEVEIGKEVKHWRKSLSDGRKGLYGISLKNIDEIDRTRKFLLRWSLRPTEPGEVRRLEPGQRFAIDQLNHLNALKEDRLKKMANTIIMHALGYCYDVRKKKWQAKNPACQIILFEDLSNYNPYEERSRFENSKLMKWSRREIPRQVALQGEIYGLQVGEVGAQFSSRFHAKTGSPGIRCSVVTKEKLQDNRFFKNLQREGRLTLDKIAVLKEGDLYPDKGGEKFISLSKDRKCVTTHADINAAQNLQKRFWTRTHGFYKVYCKAYQVDGQTVYIPESKDQKQKIIEEFGEGYFILKDGVYEWVNAGKLKIKKGSSKQSSSELVDSDILKDSFDLASELKGEKLMLYRDPSGNVFPSDKWMAAGVFFGKLERILISKLTNQYSISTIEDDSSKQSMKRPAATKKAGQAKKKKGSYPYDVPDYAYPYDVPDYAYPYDVPDYA

SEQ ID NO: 137 - DNA, 4092 bp, Artificial Sequence
  Description of Artificial Sequence: Synthetic polynucleotide
gccaccatggccccaaagaagaagcggaaggtcggtatccacggagtcccagcagccgccaccagatccttcatcctgaagatcgagcccaacgaggaagtgaagaaaggcctctggaaaacccacgaggtgctgaaccacggaatcgcctactacatgaatatcctgaagctgatccggcaagaggccatctacgagcaccacgagcaggaccccaagaatcccaagaaggtgtccaaggccgagatccaggccgagctgtgggatttcgtgctgaagatgcagaagtgcaacagcttcacacacgaggtggacaaggacgaggtgttcaacatcctgagagagctgtacgaggaactggtgcccagcagcgtggaaaagaagggcgaagccaaccagctgagcaacaagtttctgtaccctctggtggaccccaacagccagtctggaaagggaacagccagcagcggcagaaagcccagatggtacaacctgaagattgccggcgatccctcctgggaagaagagaagaagaagtgggaagaagataagaaaaaggacccgctggccaagatcctgggcaagctggctgagtacggactgatccctctgttcatcccctacaccgacagcaacgagcccatcgtgaaagaaatcaagtggatggaaaagtcccggaaccagagcgtgcggcggctggataaggacatgttcattcaggccctggaacggttcctgagctgggagagctggaacctgaaagtgaaagaggaatacgagaaggtcgagaaagagtacaagaccctggaagagaggatcaaagaggacatccaggctctgaaggctctggaacagtatgagaaagagcggcaagaacagctgctgcgggacaccctgaacaccaacgagtaccggctgagcaagagaggccttagaggctggcgggaaatcatccagaaatggctgaaaatggacgagaacgagccctccgagaagtacctggaagtgttcaaggactaccagcggaagcaccctagagaggccggcgattacagcgtgtacgagttcctgtccaagaaagagaaccacttcatctggcggaatcaccctgagtacccctacctgtacgccaccttctgcgagatcgacaagaaaaagaaggacgccaagcagcaggccaccttcacactggccgatcctatcaatcaccctctgtgggtccgattcgaggaaagaagcggcagcaacctgaacaagtacagaatcctgaccgagcagctgcacaccgagaagctgaagaaaaagctgacagtgcagctggaccggctgatctaccctacagaatctggcggctgggaagagaagggcaaagtggacattgtgctgctgcccagccggcagttctacaaccagatcttcctggacatcgaggaaaagggcaagcacgccttcacctacaaggatgagagcatcaagttccctctgaagggcacactcggcggagccagagtgcagttcgacagagatcacctgagaagataccctcacaaggtggaaagcggcaacgtgggcagaatctacttcaacatgaccgtgaacatcgagcctacagagtccccagtgtccaagtctctgaagatccaccgggacgacttccccaaggtggtcaacttcaagcccaaagaactgaccgagtggatcaaggacagcaagggcaagaaactgaagtccggcatcgagtccctggaaatcggcctgagagtgatgagcatcgacctgggacagagacaggccgctgccgcctctattttcgaggtggtggatcagaagcccgacatcgaaggcaagctgtttttcccaatcaagggcaccgagctgtatgccgtgcacagagccagcttcaacatcaagctgcccggcgagacactggtcaagagcagagaagtgctgcggaaggccagagaggacaatctgaaactgatgaaccagaagctcaacttcctgcggaacgtgctgcacttccagcagttcgaggacatcaccgagagagagaagcgggtcaccaagtggatcagcagacaagagaacagcgacgtgcccctggtgtaccaggatgagctgatccagatccgcgagctgatgtacaagccttacaaggactgggtcgccttcctgaagcagctccacaagagactggaagtcgagatcggcaaagaagtgaagcactggcggaagtccctgagcgacggaagaaagggcctgtacggcatctccctgaagaacatcgacgagatcgatcggacccggaagttcctgctgagatggtccctgaggcctaccgaacctggcgaagtgcgtagactggaacccggccagagattcgccatcgaccagctgaatcacctgaacgccctgaaagaagatcggctgaagaagatggccaacaccatcatcatgcacgccctgggctactgctacgacgtgcggaagaagaaatggcaggctaagaaccccgcctgccagatcatcctgttcgaggatctgagcaactacaacccctacgaggaaaggtcccgcttcgagaacagcaagctcatgaagtggtccagacgcgagatccccagacaggttgcactgcagggcgagatctatggcctgcaagtgggagaagtgggcgctcagttcagcagcagattccacgccaagacaggcagccctggcatcagatgtagcgtcgtgaccaaagagaagctgcaggacaatcggttcttcaagaatctgcagagagagggcagactgaccctggacaaaatcgccgtgctgaaagagggcgatctgtacccagacaaaggcggcgagaagttcatcagcctgagcaaggatcggaagtgcgtgaccacacacgccgacatcaacgccgctcagaacctgcagaagcggttctggacaagaacccacggcttctacaaggtgtactgcaaggcctaccaggtggacggaggctctggaggaagctccgaagtcgagttttcccatgagtactggatgagacacgcattgactctcgcaaagagggctcgagatgaacgcgaggtgcccgtgggggcagtactcgtgctcaacaatcgcgtaatcggcgaaggttggaatagggcaatcggactccacgaccccactgcacatgcggaaatcatggcccttcgacagggagggcttgtgatgcagaattatcgactttatgatgcgacgctgtacgtcacgtttgaaccttgcgtaatgtgcgcgggagctatgattcactcccgcattggacgagttgtattcggtgttcgcaacgccaagacgggtgccgcaggttcactgatggacgtgctgcatcatccaggcatgaaccaccgggtagaaatcacagaaggcatattggcggacgaatgtgcggcgctgttgtgtcgtttttttcgcatgcccaggcgggtctttaacgcccagaaaaaagcacaatcctctactgacggctcttctggatctgaaacacctggcacaagcgagagcgccacccctgagagctctggcggccagaccgtgtacatccctgagagcaaggaccagaagcagaagatcatcgaagagttcggcgagggctacttcattctgaaggacggggtgtacgaatgggtcaacgccggcaagctgaaaatcaagaagggcagctccaagcagagcagcagcgagctggtggatagcgacatcctgaaagacagcttcgacctggcctccgagctgaaaggcgaaaagctgatgctgtacagggaccccagcggcaatgtgttccccagcgacaaatggatggccgctggcgtgttcttcggaaagctggaacgcatcctgatcagcaagctgaccaaccagtactccatcagcaccatcgaggacgacagcagcaagcagtctatgaaaaggccggcggccacgaaaaaggccggccaggcaaaaaagaaaaagggatcctacccatacgatgttccagattacgcttatccctacgacgtgcctgattatgcatacccatatgatgtccccgactatgcctaa

SEQ ID NO: 138 - protein, 1361 aa, Artificial Sequence
  Description of Artificial Sequence: Synthetic polypeptide
MAPKKKRKVGIHGVPAAATRSFILKIEPNEEVKKGLWKTHEVLNHGIAYYMNILKLIRQEAIYEHHEQDPKNPKKVSKAEIQAELWDFVLKMQKCNSFTHEVDKDEVFNILRELYEELVPSSVEKKGEANQLSNKFLYPLVDPNSQSGKGTASSGRKPRWYNLKIAGDPSWEEEKKKWEEDKKKDPLAKILGKLAEYGLIPLFIPYTDSNEPIVKEIKWMEKSRNQSVRRLDKDMFIQALERFLSWESWNLKVKEEYEKVEKEYKTLEERIKEDIQALKALEQYEKERQEQLLRDTLNTNEYRLSKRGLRGWREIIQKWLKMDENEPSEKYLEVFKDYQRKHPREAGDYSVYEFLSKKENHFIWRNHPEYPYLYATFCEIDKKKKDAKQQATFTLADPINHPLWVRFEERSGSNLNKYRILTEQLHTEKLKKKLTVQLDRLIYPTESGGWEEKGKVDIVLLPSRQFYNQIFLDIEEKGKHAFTYKDESIKFPLKGTLGGARVQFDRDHLRRYPHKVESGNVGRIYFNMTVNIEPTESPVSKSLKIHRDDFPKVVNFKPKELTEWIKDSKGKKLKSGIESLEIGLRVMSIDLGQRQAAAASIFEVVDQKPDIEGKLFFPIKGTELYAVHRASFNIKLPGETLVKSREVLRKAREDNLKLMNQKLNFLRNVLHFQQFEDITEREKRVTKWISRQENSDVPLVYQDELIQIRELMYKPYKDWVAFLKQLHKRLEVEIGKEVKHWRKSLSDGRKGLYGISLKNIDEIDRTRKFLLRWSLRPTEPGEVRRLEPGQRFAIDQLNHLNALKEDRLKKMANTIIMHALGYCYDVRKKKWQAKNPACQIILFEDLSNYNPYEERSRFENSKLMKWSRREIPRQVALQGEIYGLQVGEVGAQFSSRFHAKTGSPGIRCSVVTKEKLQDNRFFKNLQREGRLTLDKIAVLKEGDLYPDKGGEKFISLSKDRKCVTTHADINAAQNLQKRFWTRTHGFYKVYCKAYQVDGGSGGSSEVEFSHEYWMRHALTLAKRARDEREVPVGAVLVLNNRVIGEGWNRAIGLHDPTAHAEIMALRQGGLVMQNYRLYDATLYVTFEPCVMCAGAMIHSRIGRVVFGVRNAKTGAAGSLMDVLHHPGMNHRVEITEGILADECAALLCRFFRMPRRVFNAQKKAQSSTDGSSGSETPGTSESATPESSGGQTVYIPESKDQKQKIIEEFGEGYFILKDGVYEWVNAGKLKIKKGSSKQSSSELVDSDILKDSFDLASELKGEKLMLYRDPSGNVFPSDKWMAAGVFFGKLERILISKLTNQYSISTIEDDSSKQSMKRPAATKKAGQAKKKKGSYPYDVPDYAYPYDVPDYAYPYDVPDYA

SEQ ID NO: 139 - DNA, 4092 bp, Artificial Sequence
  Description of Artificial Sequence: Synthetic polynucleotide
gccaccatggccccaaagaagaagcggaaggtcggtatccacggagtcccagcagccgccaccagatccttcatcctgaagatcgagcccaacgaggaagtgaagaaaggcctctggaaaacccacgaggtgctgaaccacggaatcgcctactacatgaatatcctgaagctgatccggcaagaggccatctacgagcaccacgagcaggaccccaagaatcccaagaaggtgtccaaggccgagatccaggccgagctgtgggatttcgtgctgaagatgcagaagtgcaacagcttcacacacgaggtggacaaggacgaggtgttcaacatcctgagagagctgtacgaggaactggtgcccagcagcgtggaaaagaagggcgaagccaaccagctgagcaacaagtttctgtaccctctggtggaccccaacagccagtctggaaagggaacagccagcagcggcagaaagcccagatggtacaacctgaagattgccggcgatccctcctgggaagaagagaagaagaagtgggaagaagataagaaaaaggacccgctggccaagatcctgggcaagctggctgagtacggactgatccctctgttcatcccctacaccgacagcaacgagcccatcgtgaaagaaatcaagtggatggaaaagtcccggaaccagagcgtgcggcggctggataaggacatgttcattcaggccctggaacggttcctgagctgggagagctggaacctgaaagtgaaagaggaatacgagaaggtcgagaaagagtacaagaccctggaagagaggatcaaagaggacatccaggctctgaaggctctggaacagtatgagaaagagcggcaagaacagctgctgcgggacaccctgaacaccaacgagtaccggctgagcaagagaggccttagaggctggcgggaaatcatccagaaatggctgaaaatggacgagaacgagccctccgagaagtacctggaagtgttcaaggactaccagcggaagcaccctagagaggccggcgattacagcgtgtacgagttcctgtccaagaaagagaaccacttcatctggcggaatcaccctgagtacccctacctgtacgccaccttctgcgagatcgacaagaaaaagaaggacgccaagcagcaggccaccttcacactggccgatcctatcaatcaccctctgtgggtccgattcgaggaaagaagcggcagcaacctgaacaagtacagaatcctgaccgagcagctgcacaccgagaagctgaagaaaaagctgacagtgcagctggaccggctgatctaccctacagaatctggcggctgggaagagaagggcaaagtggacattgtgctgctgcccagccggcagttctacaaccagatcttcctggacatcgaggaaaagggcaagcacgccttcacctacaaggatgagagcatcaagttccctctgaagggcacactcggcggagccagagtgcagttcgacagagatcacctgagaagataccctcacaaggtggaaagcggcaacgtgggcagaatctacttcaacatgaccgtgaacatcgagcctacagagtccccagtgtccaagtctctgaagatccaccgggacgacttccccaaggtggtcaacttcaagcccaaagaactgaccgagtggatcaaggacagcaagggcaagaaactgaagtccggcatcgagtccctggaaatcggcctgagagtgatgagcatcgacctgggacagagacaggccgctgccgcctctattttcgaggtggtggatcagaagcccgacatcgaaggcaagctgtttttcccaatcaagggcaccgagctgtatgccgtgcacagagccagcttcaacatcaagctgcccggcgagacactggtcaagagcagagaagtgctgcggaaggccagagaggacaatctgaaactgatgaaccagaagctcaacttcctgcggaacgtgctgcacttccagcagttcgaggacatcaccgagagagagaagcgggtcaccaagtggatcagcagacaagagaacagcgacgtgcccctggtgtaccaggatgagctgatccagatccgcgagctgatgtacaagccttacaaggactgggtcgccttcctgaagcagctccacaagagactggaagtcgagatcggcaaagaagtgaagcactggcggaagtccctgagcgacggaagaaagggcctgtacggcatctccctgaagaacatcgacgagatcgatcggacccggaagttcctgctgagatggtccctgaggcctaccgaacctggcgaagtgcgtagactggaacccggccagagattcgccatcgaccagctgaatcacctgaacgccctgaaagaagatcggctgaagaagatggccaacaccatcatcatgcacgccctgggctactgctacgacgtgcggaagaagaaatggcaggctaagaaccccgcctgccagatcatcctgttcgaggatctgagcaactacaacccctacgaggaaaggtcccgcttcgagaacagcaagctcatgaagtggtccagacgcgagatccccagacaggttgcactgcagggcgagatctatggcctgcaagtgggagaagtgggcgctcagttcagcagcagattccacgccaagacaggcagccctggcatcagatgtagcgtcgtgaccaaagagaagctgcaggacaatcggttcttcaagaatctgcagagagagggcagactgaccctggacaaaatcgccgtgctgaaagagggcgatctgtacccagacaaaggcggcgagaagttcatcagcctgagcaaggatcggaagtgcgtgaccacacacgccgacatcaacgccgctcagaacctgcagaagcggttctggacaagaacccacggcttctacaaggtgtactgcaaggcctaccaggtggacggccagaccgtgtacatccctgagagcaaggaccagaagcagaagatcatcgaagagttcggcgagggctacttcattctgaaggacggggtgtacgaatgggtcaacgccggcaagggaggctctggaggaagctccgaagtcgagttttcccatgagtactggatgagacacgcattgactctcgcaaagagggctcgagatgaacgcgaggtgcccgtgggggcagtactcgtgctcaacaatcgcgtaatcggcgaaggttggaatagggcaatcggactccacgaccccactgcacatgcggaaatcatggcccttcgacagggagggcttgtgatgcagaattatcgactttatgatgcgacgctgtacgtcacgtttgaaccttgcgtaatgtgcgcgggagctatgattcactcccgcattggacgagttgtattcggtgttcgcaacgccaagacgggtgccgcaggttcactgatggacgtgctgcatcatccaggcatgaaccaccgggtagaaatcacagaaggcatattggcggacgaatgtgcggcgctgttgtgtcgtttttttcgcatgcccaggcgggtctttaacgcccagaaaaaagcacaatcctctactgacggctcttctggatctgaaacacctggcacaagcgagagcgccacccctgagagctctggcctgaaaatcaagaagggcagctccaagcagagcagcagcgagctggtggatagcgacatcctgaaagacagcttcgacctggcctccgagctgaaaggcgaaaagctgatgctgtacagggaccccagcggcaatgtgttccccagcgacaaatggatggccgctggcgtgttcttcggaaagctggaacgcatcctgatcagcaagctgaccaaccagtactccatcagcaccatcgaggacgacagcagcaagcagtctatgaaaaggccggcggccacgaaaaaggccggccaggcaaaaaagaaaaagggatcctacccatacgatgttccagattacgcttatccctacgacgtgcctgattatgcatacccatatgatgtccccgactatgcctaa

SEQ ID NO: 140 - protein, 1361 aa, Artificial Sequence
  Description of Artificial Sequence: Synthetic polypeptide
MAPKKKRKVGIHGVPAAATRSFILKIEPNEEVKKGLWKTHEVLNHGIAYYMNILKLIRQEAIYEHHEQDPKNPKKVSKAEIQAELWDFVLKMQKCNSFTHEVDKDEVFNILRELYEELVPSSVEKKGEANQLSNKFLYPLVDPNSQSGKGTASSGRKPRWYNLKIAGDPSWEEEKKKWEEDKKKDPLAKILGKLAEYGLIPLFIPYTDSNEPIVKEIKWMEKSRNQSVRRLDKDMFIQALERFLSWESWNLKVKEEYEKVEKEYKTLEERIKEDIQALKALEQYEKERQEQLLRDTLNTNEYRLSKRGLRGWREIIQKWLKMDENEPSEKYLEVFKDYQRKHPREAGDYSVYEFLSKKENHFIWRNHPEYPYLYATFCEIDKKKKDAKQQATFTLADPINHPLWVRFEERSGSNLNKYRILTEQLHTEKLKKKLTVQLDRLIYPTESGGWEEKGKVDIVLLPSRQFYNQIFLDIEEKGKHAFTYKDESIKFPLKGTLGGARVQFDRDHLRRYPHKVESGNVGRIYFNMTVNIEPTESPVSKSLKIHRDDFPKVVNFKPKELTEWIKDSKGKKLKSGIESLEIGLRVMSIDLGQRQAAAASIFEVVDQKPDIEGKLFFPIKGTELYAVHRASFNIKLPGETLVKSREVLRKAREDNLKLMNQKLNFLRNVLHFQQFEDITEREKRVTKWISRQENSDVPLVYQDELIQIRELMYKPYKDWVAFLKQLHKRLEVEIGKEVKHWRKSLSDGRKGLYGISLKNIDEIDRTRKFLLRWSLRPTEPGEVRRLEPGQRFAIDQLNHLNALKEDRLKKMANTIIMHALGYCYDVRKKKWQAKNPACQIILFEDLSNYNPYEERSRFENSKLMKWSRREIPRQVALQGEIYGLQVGEVGAQFSSRFHAKTGSPGIRCSVVTKEKLQDNRFFKNLQREGRLTLDKIAVLKEGDLYPDKGGEKFISLSKDRKCVTTHADINAAQNLQKRFWTRTHGFYKVYCKAYQVDGQTVYIPESKDQKQKIIEEFGEGYFILKDGVYEWVNAGKGGSGGSSEVEFSHEYWMRHALTLAKRARDEREVPVGAVLVLNNRVIGEGWNRAIGLHDPTAHAEIMALRQGGLVMQNYRLYDATLYVTFEPCVMCAGAMIHSRIGRVVFGVRNAKTGAAGSLMDVLHHPGMNHRVEITEGILADECAALLCRFFRMPRRVFNAQKKAQSSTDGSSGSETPGTSESATPESSGLKIKKGSSKQSSSELVDSDILKDSFDLASELKGEKLMLYRDPSGNVFPSDKWMAAGVFFGKLERILISKLTNQYSISTIEDDSSKQSMKRPAATKKAGQAKKKKGSYPYDVPDYAYPYDVPDYAYPYDVPDYA

SEQ ID NO: 141 - protein, 7 aa, Artificial Sequence
  Description of Artificial Sequence: Synthetic peptide
GGGSGGS

SEQ ID NO: 142 - DNA, 117 bp, Artificial Sequence
  Description of Artificial Sequence: Synthetic polynucleotide
  modified_base (98)..(117): a, c, t, g, unknown or other
gttctgtcttttggtcaggacaaccgtctagctataagtgctgcagggtgtgagaaactcctattgctggacgatgtctcttacgaggcattagcacnnnnnnnnnnnnnnnnnnnn

SEQ ID NO: 143 - DNA, 108 bp, Artificial Sequence
  Description of Artificial Sequence: Synthetic polynucleotide
  modified_base (89)..(108): a, c, t, g, unknown or other
gacctatagggtcaatgaatctgtgcgtgtgccataagtaattaaaaattacccaccacaggagcacctgaaaacaggtgcttggcacnnnnnnnnnnnnnnnnnnnn

SEQ ID NO: 144 - DNA, 119 bp, Artificial Sequence
  Description of Artificial Sequence: Synthetic polynucleotide
  modified_base (100)..(119): a, c, t, g, unknown or other
gtctaaaggacagaatttttcaacgggtgtgccaatggccactttccaggtggcaaagcccgttgaacttctcaaaaagaacgatctgagaagtggcacnnnnnnnnnnnnnnnnnnnn

SEQ ID NO: 145 - protein, 1368 aa, Artificial Sequence
  Description of Artificial Sequence: Synthetic polypeptide
MDKKYSIGLAIGTNSVGWAVITDEYKVPSKKFKVLGNTDRHSIKKNLIGALLFDSGETAEATRLKRTARRRYTRRKNRICYLQEIFSNEMAKVDDSFFHRLEESFLVEEDKKHERHPIFGNIVDEVAYHEKYPTIYHLRKKLVDSTDKADLRLIYLALAHMIKFRGHFLIEGDLNPDNSDVDKLFIQLVQTYNQLFEENPINASGVDAKAILSARLSKSRRLENLIAQLPGEKKNGLFGNLIALSLGLTPNFKSNFDLAEDAKLQLSKDTYDDDLDNLLAQIGDQYADLFLAAKNLSDAILLSDILRVNTEITKAPLSASMIKRYDEHHQDLTLLKALVRQQLPEKYKEIFFDQSKNGYAGYIDGGASQEEFYKFIKPILEKMDGTEELLVKLNREDLLRKQRTFDNGSIPHQIHLGELHAILRRQEDFYPFLKDNREKIEKILTFRIPYYVGPLARGNSRFAWMTRKSEETITPWNFEEVVDKGASAQSFIERMTNFDKNLPNEKVLPKHSLLYEYFTVYNELTKVKYVTEGMRKPAFLSGEQKKAIVDLLFKTNRKVTVKQLKEDYFKKIECFDSVEISGVEDRFNASLGTYHDLLKIIKDKDFLDNEENEDILEDIVLTLTLFEDREMIEERLKTYAHLFDDKVMKQLKRRRYTGWGRLSRKLINGIRDKQSGKTILDFLKSDGFANRNFMQLIHDDSLTFKEDIQKAQVSGQGDSLHEHIANLAGSPAIKKGILQTVKVVDELVKVMGRHKPENIVIEMARENQTTQKGQKNSRERMKRIEEGIKELGSQILKEHPVENTQLQNEKLYLYYLQNGRDMYVDQELDINRLSDYDVDHIVPQSFLKDDSIDNKVLTRSDKNRGKSDNVPSEEVVKKMKNYWRQLLNAKLITQRKFDNLTKAERGGLSELDKAGFIKRQLVETRQITKHVAQILDSRMNTKYDENDKLIREVKVITLKSKLVSDFRKDFQFYKVREINNYHHAHDAYLNAVVGTALIKKYPKLESEFVYGDYKVYDVRKMIAKSEQEIGKATAKYFFYSNIMNFFKTEITLANGEIRKRPLIETNGETGEIVWDKGRDFATVRKVLSMPQVNIVKKTEVQTGGFSKESILPKRNSDKLIARKKDWDPKKYGGFESPTVAYSVLVVAKVEKGKSKKLKSVKELLGITIMERSSFEKNPIDFLEAKGYKEVKKDLIIKLPKYSLFELENGRKRMLASAGELQKGNELALPSKYVNFLYLASHYEKLKGSPEDNEQKQLFVEQHKHYLDEIIEQISEFSKRVILADANLDKVLSAYNKHRDKPIREQAENIIHLFTLTNLGAPAAFKYFDTTIDRKQYRSTKEVLDATLIHQSITGLYETRIDLSQLGGD

SEQ ID NO: 146 - protein, 1368 aa, Artificial Sequence
  Description of Artificial Sequence: Synthetic polypeptide
MDKKYSIGLAIGTNSVGWAVITDEYKVPSKKFKVLGNTDRHSIKKNLIGALLFDSGETAEATRLKRTARRRYTRRKNRICYLQEIFSNEMAKVDDSFFHRLEESFLVEEDKKHERHPIFGNIVDEVAYHEKYPTIYHLRKKLVDSTDKADLRLIYLALAHMIKFRGHFLIEGDLNPDNSDVDKLFIQLVQTYNQLFEENPINASGVDAKAILSARLSKSRRLENLIAQLPGEKKNGLFGNLIALSLGLTPNFKSNFDLAEDAKLQLSKDTYDDDLDNLLAQIGDQYADLFLAAKNLSDAILLSDILRVNTEITKAPLSASMIKRYDEHHQDLTLLKALVRQQLPEKYKEIFFDQSKNGYAGYIDGGASQEEFYKFIKPILEKMDGTEELLVKLNREDLLRKQRTFDNGSIPHQIHLGELHAILRRQEDFYPFLKDNREKIEKILTFRIPYYVGPLARGNSRFAWMTRKSEETITPWNFEEVVDKGASAQSFIERMTNFDKNLPNEKVLPKHSLLYEYFTVYNELTKVKYVTEGMRKPAFLSGEQKKAIVDLLFKTNRKVTVKQLKEDYFKKIECFDSVEISGVEDRFNASLGTYHDLLKIIKDKDFLDNEENEDILEDIVLTLTLFEDREMIEERLKTYAHLFDDKVMKQLKRRRYTGWGRLSRKLINGIRDKQSGKTILDFLKSDGFANRNFMQLIHDDSLTFKEDIQKAQVSGQGDSLHEHIANLAGSPAIKKGILQTVKVVDELVKVMGRHKPENIVIEMARENQTTQKGQKNSRERMKRIEEGIKELGSQILKEHPVENTQLQNEKLYLYYLQNGRDMYVDQELDINRLSDYDVDHIVPQSFLKDDSIDNKVLTRSDKNRGKSDNVPSEEVVKKMKNYWRQLLNAKLITQRKFDNLTKAERGGLSELDKAGFIKRQLVETRQITKHVAQILDSRMNTKYDENDKLIREVKVITLKSKLVSDFRKDFQFYKVREINNYHHAHDAYLNAVVGTALIKKYPKLESEFVYGDYKVYDVRKMIAKSEQEIGKATAKYFFYSNIMNFFKTEITLANGEIRKRPLIETNGETGEIVWDKGRDFATVRKVLSMPQVNIVKKTEVQTGGFSKESILPKRNSDKLIARKKDWDPKKYGGFVSPTVAYSVLVVAKVEKGKSKKLKSVKELLGITIMERSSFEKNPIDFLEAKGYKEVKKDLIIKLPKYSLFELENGRKRMLASAGELQKGNELALPSKYVNFLYLASHYEKLKGSPEDNEQKQLFVEQHKHYLDEIIEQISEFSKRVILADANLDKVLSAYNKHRDKPIREQAENIIHLFTLTNLGAPAAFKYFDTTIDRKQYRSTKEVLDATLIHQSITGLYETRIDLSQLGGD

SEQ ID NO: 147 - protein, 1368 aa, Artificial Sequence
  Description of Artificial Sequence: Synthetic polypeptide
MDKKYSIGLAIGTNSVGWAVITDEYKVPSKKFKVLGNTDRHSIKKNLIGALLFDSGETAEATRLKRTARRRYTRRKNRICYLQEIFSNEMAKVDDSFFHRLEESFLVEEDKKHERHPIFGNIVDEVAYHEKYPTIYHLRKKLVDSTDKADLRLIYLALAHMIKFRGHFLIEGDLNPDNSDVDKLFIQLVQTYNQLFEENPINASGVDAKAILSARLSKSRRLENLIAQLPGEKKNGLFGNLIALSLGLTPNFKSNFDLAEDAKLQLSKDTYDDDLDNLLAQIGDQYADLFLAAKNLSDAILLSDILRVNTEITKAPLSASMIKRYDEHHQDLTLLKALVRQQLPEKYKEIFFDQSKNGYAGYIDGGASQEEFYKFIKPILEKMDGTEELLVKLNREDLLRKQRTFDNGSIPHQIHLGELHAILRRQEDFYPFLKDNREKIEKILTFRIPYYVGPLARGNSRFAWMTRKSEETITPWNFEEVVDKGASAQSFIERMTNFDKNLPNEKVLPKHSLLYEYFTVYNELTKVKYVTEGMRKPAFLSGEQKKAIVDLLFKTNRKVTVKQLKEDYFKKIECFDSVEISGVEDRFNASLGTYHDLLKIIKDKDFLDNEENEDILEDIVLTLTLFEDREMIEERLKTYAHLFDDKVMKQLKRRRYTGWGRLSRKLINGIRDKQSGKTILDFLKSDGFANRNFMQLIHDDSLTFKEDIQKAQVSGQGDSLHEHIANLAGSPAIKKGILQTVKVVDELVKVMGRHKPENIVIEMARENQTTQKGQKNSRERMKRIEEGIKELGSQILKEHPVENTQLQNEKLYLYYLQNGRDMYVDQELDINRLSDYDVDHIVPQSFLKDDSIDNKVLTRSDKNRGKSDNVPSEEVVKKMKNYWRQLLNAKLITQRKFDNLTKAERGGLSELDKAGFIKRQLVETRQITKHVAQILDSRMNTKYDENDKLIREVKVITLKSKLVSDFRKDFQFYKVREINNYHHAHDAYLNAVVGTALIKKYPKLESEFVYGDYKVYDVRKMIAKSEQEIGKATAKYFFYSNIMNFFKTEITLANGEIRKRPLIETNGETGEIVWDKGRDFATVRKVLSMPQVNIVKKTEVQTGGFSKESILPKRNSDKLIARKKDWDPKKYGGFVSPTVAYSVLVVAKVEKGKSKKLKSVKELLGITIMERSSFEKNPIDFLEAKGYKEVKKDLIIKLPKYSLFELENGRKRMLASARELQKGNELALPSKYVNFLYLASHYEKLKGSPEDNEQKQLFVEQHKHYLDEIIEQISEFSKRVILADANLDKVLSAYNKHRDKPIREQAENIIHLFTLTNLGAPAAFKYFDTTIDRKEYRSTKEVLDATLIHQSITGLYETRIDLSQLGGD

SEQ ID NO: 148 - protein, 1359 aa, Artificial Sequence
  Description of Artificial Sequence: Synthetic polypeptide
MDKKYSIGLDIGTNSVGWAVITDDYKVPSKKFKVLGNTDRHSIKKNLIGALLFGSGETAEATRLKRTARRRYTRRKNRICYLQEIFSNEMAKVDDSFFHRLEESFLVEEDKKHERHPIFGNIVDEVAYHEKYPTIYHLRKKLADSTDKADLRLIYLALAHMIKFRGHFLIEGDLNPDNSDVDKLFIQLVQIYNQLFEENPINASRVDAKAILSARLSKSRRLENLIAQLPGEKRNGLFGNLIALSLGLTPNFKSNFDLAEDAKLQLSKDTYDDDLDNLLAQIGDQYADLFLAAKNLSDAILLSDILRVNSEITKAPLSASMIKRYDEHHQDLTLLKALVRQQLPEKYKEIFFDQSKNGYAGYIDGGASQEEFYKFIKPILEKMDGTEELLVKLNREDLLRKQRTFDNGSIPHQIHLGELHAILRRQEDFYPFLKDNREKIEKILTFRIPYYVGPLARGNSRFAWMTRKSEETITPWNFEEVVDKGASAQSFIERMTNFDKNLPNEKVLPKHSLLYEYFTVYNELTKVKYVTEGMRKPAFLSGEQKKAIVDLLFKTNRKVTVKQLKEDYFKKIECFDSVEISGVEDRFNASLGAYHDLLKIIKDKDFLDNEENEDILEDIVLTLTLFEDRGMIEERLKTYAHLFDDKVMKQLKRRRYTGWGRLSRKLINGIRDKQSGKTILDFLKSDGFANRNFMQLIHDDSLTFKEDIQKAQVSGQGHSLHEQIANLAGSPAIKKGILQTVKIVDELVKVMGHKPENIVIEMARENQTTQKGQKNSRERMKRIEEGIKELGSQILKEHPVENTQLQNEKLYLYYLQNGRDMYVDQELDINRLSDYDVDHIVPQSFIKDDSIDNKVLTRSDKNRGKSDNVPSEEVVKKMKNYWRQLLNAKLITQRKFDNLTKAERGGLSELDKAGFIKRQLVETRQITKHVAQILDSRMNTKYDENDKLIREVKVITLKSKLVSDFRKDFQFYKVREINNYHHAHDAYLNAVVGTALIKKYPKLESEFVYGDYKVYDVRKMIAKSEQEIGKATAKYFFYSNIMNFFKTEITLANGEIRKRPLIETNGETGEIVWDKGRDFATVRKVLSMPQVNIVKKTEIQTVGQNGGLFDDNPKSPLEVTPSKLVPLKKELNPKKYGGYQKPTTAYPVLLITDTKQLIPISVMNKKQFEQNPVKFLRDRGYQQVGKNDFIKLPKYTLVDIGDGIKRLWASSKEIHKGNQLVVSKKSQILLYHAHHLDSDLSNDYLQNHNQQFDVLFNEIISFSKKCKLGKEHIQKIENVYSNKKNSASIEELAESFIKLLGFTQLGATSPFNFLGVKLNQKQYKGKKDYILPCTEGTLIRQSITGLYETRVDLSKIGED

SEQ ID NO: 149 - protein, 1367 aa, Artificial Sequence
  Description of Artificial Sequence: Synthetic polypeptide
DKKYSIGLAIGTNSVGWAVITDEYKVPSKKFKVLGNTDRHSIKKNLIGALLFDSGETAEATRLKRTARRRYTRRKNRICYLQEIFSNEMAKVDDSFFHRLEESFLVEEDKKHERHPIFGNIVDEVAYHEKYPTIYHLRKKLVDSTDKADLRLIYLALAHMIKFRGHFLIEGDLNPDNSDVDKLFIQLVQTYNQLFEENPINASGVDAKAILSARLSKSRRLENLIAQLPGEKKNGLFGNLIALSLGLTPNFKSNFDLAEDAKLQLSKDTYDDDLDNLLAQIGDQYADLFLAAKNLSDAILLSDILRVNTEITKAPLSASMIKRYDEHHQDLTLLKALVRQQLPEKYKEIFFDQSKNGYAGYIDGGASQEEFYKFIKPILEKMDGTEELLVKLNREDLLRKQRTFDNGSIPHQIHLGELHAILRRQEDFYPFLKDNREKIEKILTFRIPYYVGPLARGNSRFAWMTRKSEETITPWNFEEVVDKGASAQSFIERMTAFDKNLPNEKVLPKHSLLYEYFTVYNELTKVKYVTEGMRKPAFLSGEQKKAIVDLLFKTNRKVTVKQLKEDYFKKIECFDSVEISGVEDRFNASLGTYHDLLKIIKDKDFLDNEENEDILEDIVLTLTLFEDREMIEERLKTYAHLFDDKVMKQLKRRRYTGWGALSRKLINGIRDKQSGKTILDFLKSDGFANRNFMALIHDDSLTFKEDIQKAQVSGQGDSLHEHIANLAGSPAIKKGILQTVKVVDELVKVMGRHKPENIVIEMARENQTTQKGQKNSRERMKRIEEGIKELGSQILKEHPVENTQLQNEKLYLYYLQNGRDMYVDQELDINRLSDYDVDHIVPQSFLKDDSIDNKVLTRSDKNRGKSDNVPSEEVVKKMKNYWRQLLNAKLITQRKFDNLTKAERGGLSELDKAGFIKRQLVETRAITKHVAQILDSRMNTKYDENDKLIREVKVITLKSKLVSDFRKDFQFYKVREINNYHHAHDAYLNAVVGTALIKKYPKLESEFVYGDYKVYDVRKMIAKSEQEIGKATAKYFFYSNIMNFFKTEITLANGEIRKRPLIETNGETGEIVWDKGRDFATVRKVLSMPQVNIVKKTEVQTGGFSKESILPKRNSDKLIARKKDWDPKKYGGFDSPTVAYSVLVVAKVEKGKSKKLKSVKELLGITIMERSSFEKNPIDFLEAKGYKEVKKDLIIKLPKYSLFELENGRKRMLASAGELQKGNELALPSKYVNFLYLASHYEKLKGSPEDNEQKQLFVEQHKHYLDEIIEQISEFSKRVILADANLDKVLSAYNKHRDKPIREQAENIIHLFTLTNLGAPAAFKYFDTTIDRKRYTSTKEVLDATLIHQSITGLYETRIDLSQLGGD

SEQ ID NO: 150 - protein, 29 aa, Artificial Sequence
  Description of Artificial Sequence: Synthetic peptide
PKKKRKVEGADKRTADGSEFESPKKKRKV

SEQ ID NO: 151 - protein, 23 aa, Artificial Sequence
  Description of Artificial Sequence: Synthetic peptide
RKSGKIAAIVVKRPRKPKKKRKV

SEQ ID NO: 152 - protein, 16 aa, Artificial Sequence
  Description of Artificial Sequence: Synthetic peptide
KRPAATKKAGQAKKKK

SEQ ID NO: 153 - protein, 167 aa, Escherichia coli; identical to SEQ ID NO: 20

SEQ ID NO: 154 - protein, 1554 aa, Artificial Sequence
  Description of Artificial Sequence: Synthetic polypeptide
MDKKYSIGLAIGTNSVGWAVITDEYKVPSKKFKVLGNTDRHSIKKNLIGALLFDSGETAEATRLKRTARRRYTRRKNRICYLQEIFSNEMAKVDDSFFHRLEESFLVEEDKKHERHPIFGNIVDEVAYHEKYPTIYHLRKKLVDSTDKADLRLIYLALAHMIKFRGHFLIEGDLNPDNSDVDKLFIQLVQTYNQLFEENPINASGVDAKAILSARLSKSRRLENLIAQLPGEKKNGLFGNLIALSLGLTPNFKSNFDLAEDAKLQLSKDTYDDDLDNLLAQIGDQYADLFLAAKNLSDAILLSDILRVNTEITKAPLSASMIKRYDEHHQDLTLLKALVRQQLPEKYKEIFFDQSKNGYAGYIDGGASQEEFYKFIKPILEKMDGTEELLVKLNREDLLRKQRTFDNGSIPHQIHLGELHAILRRQEDFYPFLKDNREKIEKILTFRIPYYVGPLARGNSRFAWMTRKSEETITPWNFEEVVDKGASAQSFIERMTNFDKNLPNEKVLPKHSLLYEYFTVYNELTKVKYVTEGMRKPAFLSGEQKKAIVDLLFKTNRKVTVKQLKEDYFKKIECFDSVEISGVEDRFNASLGTYHDLLKIIKDKDFLDNEENEDILEDIVLTLTLFEDREMIEERLKTYAHLFDDKVMKQLKRRRYTGWGRLSRKLINGIRDKQSGKTILDFLKSDGFANRNFMQLIHDDSLTFKEDIQKAQVSGQGDSLHEHIANLAGSPAIKKGILQTVKVVDELVKVMGRHKPENIVIEMARENQTTQKGQKNSRERMKRIEEGIKELGSQILKEHPVENTQLQNEKLYLYYLQNGRDMYVDQELDINRLSDYDVDHIVPQSFLKDDSIDNKVLTRSDKNRGKSDNVPSEEVVKKMKNYWRQLLNAKLITQRKFDNLTKAERGGLSELDKAGFIKRQLVETRQITKHVAQILDSRMNTKYDENDKLIREVKVITLKSKLVSDFRKDFQFYKVREINNYHHAHDAYLNAVVGTALIKKYPKLESEFVYGDYKVGSSGSETPGTSESATPESSGSEVEFSHEYWMRHALTLAKRARDEREVPVGAVLVLNNRVIGEGWNRAIGLHDPTAHAEIMALRQGGLVMQNYRLIDATLYVTFEPCVMCAGAMIHSRIGRVVFGVRNAKTGAAGSLMDVLHYPGMNHRVEITEGILADECAALLCYFFRMPRQVFNAQKKAQSSTDYDVRKMIAKSEQEIGKATAKYFFYSNIMNFFKTEITLANGEIRKRPLIETNGETGEIVWDKGRDFATVRKVLSMPQVNIVKKTEVQTGGFSKESILPKRNSDKLIARKKDWDPKKYGGFDSPTVAYSVLVVAKVEKGKSKKLKSVKELLGITIMERSSFEKNPIDFLEAKGYKEVKKDLIIKLPKYSLFELENGRKRMLASAGELQKGNELALPSKYVNFLYLASHYEKLKGSPEDNEQKQLFVEQHKHYLDEIIEQISEFSKRVILADANLDKVLSAYNKHRDKPIREQAENIIHLFTLTNLGAPAAFKYFDTTIDRKRYTSTKEVLDATLIHQSITGLYETRIDLSQLGGD

SEQ ID NO: 155 - protein, 1554 aa, Artificial Sequence
  Description of Artificial Sequence: Synthetic polypeptide
MDKKYSIGLAIGTNSVGWAVITDEYKVPSKKFKVLGNTDRHSIKKNLIGALLFDSGETAEATRLKRTARRRYTRRKNRICYLQEIFSNEMAKVDDSFFHRLEESFLVEEDKKHERHPIFGNIVDEVAYHEKYPTIYHLRKKLVDSTDKADLRLIYLALAHMIKFRGHFLIEGDLNPDNSDVDKLFIQLVQTYNQLFEENPINASGVDAKAILSARLSKSRRLENLIAQLPGEKKNGLFGNLIALSLGLTPNFKSNFDLAEDAKLQLSKDTYDDDLDNLLAQIGDQYADLFLAAKNLSDAILLSDILRVNTEITKAPLSASMIKRYDEHHQDLTLLKALVRQQLPEKYKEIFFDQSKNGYAGYIDGGASQEEFYKFIKPILEKMDGTEELLVKLNREDLLRKQRTFDNGSIPHQIHLGELHAILRRQEDFYPFLKDNREKIEKILTFRIPYYVGPLARGNSRFAWMTRKSEETITPWNFEEVVDKGASAQSFIERMTNFDKNLPNEKVLPKHSLLYEYFTVYNELTKVKYVTEGMRKPAFLSGEQKKAIVDLLFKTNRKVTVKQLKEDYFKKIECFDSVEISGVEDRFNASLGTYHDLLKIIKDKDFLDNEENEDILEDIVLTLTLFEDREMIEERLKTYAHLFDDKVMKQLKRRRYTGWGRLSRKLINGIRDKQSGKTILDFLKSDGFANRNFMQLIHDDSLTFKEDIQKAQVSGQGDSLHEHIANLAGSPAIKKGILQTVKVVDELVKVMGRHKPENIVIEMARENQTTQKGQKNSRERMKRIEEGIKELGSQILKEHPVENTQLQNEKLYLYYLQNGRDMYVDQELDINRLSDYDVDHIVPQSFLKDDSIDNKVLTRSDKNRGKSDNVPSEEVVKKMKNYWRQLLNAKLITQRKFDNLTKAERGGLSELDKAGFIKRQLVETRQITKHVAQILDSRMNTKYDENDKLIREVKVITLKSKLVSDFRKDFQFYKVREINNYHHAHDAYLNAVVGTALIKKYPKLESEFVYGDYKVYDVRKMIGSSGSETPGTSESATPESSGSEVEFSHEYWMRHALTLAKRARDEREVPVGAVLVLNNRVIGEGWNRAIGLHDPTAHAEIMALRQGGLVMQNYRLIDATLYVTFEPCVMCAGAMIHSRIGRVVFGVRNAKTGAAGSLMDVLHYPGMNHRVEITEGILADECAALLCYFFRMPRQVFNAQKKAQSSTDAKSEQEIGKATAKYFFYSNIMNFFKTEITLANGEIRKRPLIETNGETGEIVWDKGRDFATVRKVLSMPQVNIVKKTEVQTGGFSKESILPKRNSDKLIARKKDWDPKKYGGFDSPTVAYSVLVVAKVEKGKSKKLKSVKELLGITIMERSSFEKNPIDFLEAKGYKEVKKDLIIKLPKYSLFELENGRKRMLASAGELQKGNELALPSKYVNFLYLASHYEKLKGSPEDNEQKQLFVEQHKHYLDEIIEQISEFSKRVILADANLDKVLSAYNKHRDKPIREQAENIIHLFTLTNLGAPAAFKYFDTTIDRKRYTSTKEVLDATLIHQSITGLYETRIDLSQLGGD

SEQ ID NO: 156 - protein, 1554 aa, Artificial Sequence
  Description of Artificial Sequence: Synthetic polypeptide
MDKKYSIGLAIGTNSVGWAVITDEYKVPSKKFKVLGNTDRHSIKKNLIGALLFDSGETAEATRLKRTARRRYTRRKNRICYLQEIFSNEMAKVDDSFFHRLEESFLVEEDKKHERHPIFGNIVDEVAYHEKYPTIYHLRKKLVDSTDKADLRLIYLALAHMIKFRGHFLIEGDLNPDNSDVDKLFIQLVQTYNQLFEENPINASGVDAKAILSARLSKSRRLENLIAQLPGEKKNGLFGNLIALSLGLTPNFKSNFDLAEDAKLQLSKDTYDDDLDNLLAQIGDQYADLFLAAKNLSDAILLSDILRVNTEITKAPLSASMIKRYDEHHQDLTLLKALVRQQLPEKYKEIFFDQSKNGYAGYIDGGASQEEFYKFIKPILEKMDGTEELLVKLNREDLLRKQRTFDNGSIPHQIHLGELHAILRRQEDFYPFLKDNREKIEKILTFRIPYYVGPLARGNSRFAWMTRKSEETITPWNFEEVVDKGASAQSFIERMTNFDKNLPNEKVLPKHSLLYEYFTVYNELTKVKYVTEGMRKPAFLSGEQKKAIVDLLFKTNRKVTVKQLKEDYFKKIECFDSVEISGVEDRFNASLGTYHDLLKIIKDKDFLDNEENEDILEDIVLTLTLFEDREMIEERLKTYAHLFDDKVMKQLKRRRYTGWGRLSRKLINGIRDKQSGKTILDFLKSDGFANRNFMQLIHDDSLTFKEDIQKAQVSGQGDSLHEHIANLAGSPAIKKGILQTVKVVDELVKVMGRHKPENIVIEMARENQTTQKGQKNSRERMKRIEEGIKELGSQILKEHPVENTQLQNEKLYLYYLQNGRDMYVDQELDINRLSDYDVDHIVPQSFLKDDSIDNKVLTRSDKNRGKSDNVPSEEVVKKMKNYWRQLLNAKLITQRKFDNLTKAERGGLSELDKAGFIKRQLVETRQITKHVAQILDSRMNTKYDENDKLIREVKVITLKSKLVSDFRKDFQFYKVREINNYHHAHDAYLNAVVGTALIKKYPKLESEFVYGDYKVYDVRKMIAKSEQEIGSSGSETPGTSESATPESSGSEVEFSHEYWMRHALTLAKRARDEREVPVGAVLVLNNRVIGEGWNRAIGLHDPTAHAEIMALRQGGLVMQNYRLIDATLYVTFEPCVMCAGAMIHSRIGRVVFGVRNAKTGAAGSLMDVLHYPGMNHRVEITEGILADECAALLCYFFRMPRQVFNAQKKAQSSTDGKATAKYFFYSNIMNFFKTEITLANGEIRKRPLIETNGETGEIVWDKGRDFATVRKVLSMPQVNIVKKTEVQTGGFSKESILPKRNSDKLIARKKDWDPKKYGGFDSPTVAYSVLVVAKVEKGKSKKLKSVKELLGITIMERSSFEKNPIDFLEAKGYKEVKKDLIIKLPKYSLFELENGRKRMLASAGELQKGNELALPSKYVNFLYLASHYEKLKGSPEDNEQKQLFVEQHKHYLDEIIEQISEFSKRVILADANLDKVLSAYNKHRDKPIREQAENIIHLFTLTNLGAPAAFKYFDTTIDRKRYTSTKEVLDATLIHQSITGLYETRIDLSQLGGD

SEQ ID NO: 157 - protein, 1554 aa, Artificial Sequence
  Description of Artificial Sequence: Synthetic polypeptide
MDKKYSIGLAIGTNSVGWAVITDEYKVPSKKFKVLGNTDRHSIKKNLIGALLFDSGETAEATRLKRTARRRYTRRKNRICYLQEIFSNEMAKVDDSFFHRLEESFLVEEDKKHERHPIFGNIVDEVAYHEKYPTIYHLRKKLVDSTDKADLRLIYLALAHMIKFRGHFLIEGDLNPDNSDVDKLFIQLVQTYNQLFEENPINASGVDAKAILSARLSKSRRLENLIAQLPGEKKNGLFGNLIALSLGLTPNFKSNFDLAEDAKLQLSKDTYDDDLDNLLAQIGDQYADLFLAAKNLSDAILLSDILRVNTEITKAPLSASMIKRYDEHHQDLTLLKALVRQQLPEKYKEIFFDQSKNGYAGYIDGGASQEEFYKFIKPILEKMDGTEELLVKLNREDLLRKQRTFDNGSIPHQIHLGELHAILRRQEDFYPFLKDNREKIEKILTFRIPYYVGPLARGNSRFAWMTRKSEETITPWNFEEVVDKGASAQSFIERMTNFDKNLPNEKVLPKHSLLYEYFTVYNELTKVKYVTEGMRKPAFLSGEQKKAIVDLLFKTNRKVTVKQLKEDYFKKIECFDSVEISGVEDRFNASLGTYHDLLKIIKDKDFLDNEENEDILEDIVLTLTLFEDREMIEERLKTYAHLFDDKVMKQLKRRRYTGWGRLSRKLINGIRDKQSGKTILDFLKSDGFANRNFMQLIHDDSLTFKEDIQKAQVSGQGDSLHEHIANLAGSPAIKKGILQTVKVVDELVKVMGRHKPENIVIEMARENQTTQKGQKNSRERMKRIEEGIKELGSQILKEHPVENTQLQNEKLYLYYLQNGRDMYVDQELDINRLSDYDVDHIVPQSFLKDDSIDNKVLTRSDKNRGKSDNVPSEEVVKKMKNYWRQLLNAKLITQRKFDNLTKAERGGLSELDKAGFIKRQLVETRQITKHVAQILDSRMNTKYDENDKLIREVKVITLKSKLVSDFRKDFQFYKVREINNYHHAHDAYLNAVVGTALIKKYPKLESEFVYGDYKVYDVRKMIAKSEQEIGKATAKYFFYSGSSGSETPGTSESATPESSGSEVEFSHEYWMRHALTLAKRARDEREVPVGAVLVLNNRVIGEGWNRAIGLHDPTAHAEIMALRQGGLVMQNYRLIDATLYVTFEPCVMCAGAMIHSRIGRVVFGVRNAKTGAAGSLMDVLHYPGMNHRVEITEGILADECAALLCYFFRMPRQVFNAQKKAQSSTDNIMNFFKTEITLANGEIRKRPLIETNGETGEIVWDKGRDFATVRKVLSMPQVNIVKKTEVQTGGFSKESILPKRNSDKLIARKKDWDPKKYGGFDSPTVAYSVLVVAKVEKGKSKKLKSVKELLGITIMERSSFEKNPIDFLEAKGYKEVKKDLIIKLPKYSLFELENGRKRMLASAGELQKGNELALPSKYVNFLYLASHYEKLKGSPEDNEQKQLFVEQHKHYLDEIIEQISEFSKRVILADANLDKVLSAYNKHRDKPIREQAENIIHLFTLTNLGAPAAFKYFDTTIDRKRYTSTKEVLDATLIHQSITGLYETRIDLSQLGGD

SEQ ID NO: 158 - protein, 1554 aa, Artificial Sequence
  Description of Artificial Sequence: Synthetic polypeptide
MDKKYSIGLAIGTNSVGWAVITDEYKVPSKKFKVLGNTDRHSIKKNLIGALLFDSGETAEATRLKRTARRRYTRRKNRICYLQEIFSNEMAKVDDSFFHRLEESFLVEEDKKHERHPIFGNIVDEVAYHEKYPTIYHLRKKLVDSTDKADLRLIYLALAHMIKFRGHFLIEGDLNPDNSDVDKLFIQLVQTYNQLFEENPINASGVDAKAILSARLSKSRRLENLIAQLPGEKKNGLFGNLIALSLGLTPNFKSNFDLAEDAKLQLSKDTYDDDLDNLLAQIGDQYADLFLAAKNLSDAILLSDILRVNTEITKAPLSASMIKRYDEHHQDLTLLKALVRQQLPEKYKEIFFDQSKNGYAGYIDGGASQEEFYKFIKPILEKMDGTEELLVKLNREDLLRKQRTFDNGSIPHQIHLGELHAILRRQEDFYPFLKDNREKIEKILTFRIPYYVGPLARGNSRFAWMTRKSEETITPWNFEEVVDKGASAQSFIERMTNFDKNLPNEKVLPKHSLLYEYFTVYNELTKVKYVTEGMRKPAFLSGEQKKAIVDLLFKTNRKVTVKQLKEDYFKKIECFDSVEISGVEDRFNASLGTYHDLLKIIKDKDFLDNEENEDILEDIVLTLTLFEDREMIEERLKTYAHLFDDKVMKQLKRRRYTGWGRLSRKLINGIRDKQSGKTILDFLKSDGFANRNFMQLIHDDSLTFKEDIQKAQVSGQGDSLHEHIANLAGSPAIKKGILQTVKVVDELVKVMGRHKPENIVIEMARENQTTQKGQKNSRERMKRIEEGIKELGSQILKEHPVENTQLQNEKLYLYYLQNGRDMYVDQELDINRLSDYDVDHIVPQSFLKDDSIDNKVLTRSDKNRGKSDNVPSEEVVKKMKNYWRQLLNAKLITQRKFDNLTKAERGGLSELDKAGFIKRQLVETRQITKHVAQILDSRMNTKYDENDKLIREVKVITLKSKLVSDFRKDFQFYKVREINNYHHAHDAYLNAVVGTALIKKYPKLESEFVYGDYKVYDVRKMIAKSEQEIGKATAKYFFYSNIMNFFKTEITLANGEIRKRPLIETNGEGSSGSETPGTSESATPESSGSEVEFSHEYWMRHALTLAKRARDEREVPVGAVLVLNNRVIGEGWNRAIGLHDPTAHAEIMALRQGGLVMQNYRLIDATLYVTFEPCVMCAGAMIHSRIGRVVFGVRNAKTGAAGSLMDVLHYPGMNHRVEITEGILADECAALLCYFFRMPRQVFNAQKKAQSSTDTGEIVWDKGRDFATVRKVLSMPQVNIVKKTEVQTGGFSKESILPKRNSDKLIARKKDWDPKKYGGFDSPTVAYSVLVVAKVEKGKSKKLKSVKELLGITIMERSSFEKNPIDFLEAKGYKEVKKDLIIKLPKYSLFELENGRKRMLASAGELQKGNELALPSKYVNFLYLASHYEKLKGSPEDNEQKQLFVEQHKHYLDEIIEQISEFSKRVILADANLDKVLSAYNKHRDKPIREQAENIIHLFTLTNLGAPAAFKYFDTTIDRKRYTSTKEVLDATLIHQSITGLYETRIDLSQLGGD

SEQ ID NO: 159 - protein, 1554 aa, Artificial Sequence
  Description of Artificial Sequence: Synthetic polypeptide
MDKKYSIGLAIGTNSVGWAVITDEYKVPSKKFKVLGNTDRHSIKKNLIGALLFDSGETAEATRLKRTARRRYTRRKNRICYLQEIFSNEMAKVDDSFFHRLEESFLVEEDKKHERHPIFGNIVDEVAYHEKYPTIYHLRKKLVDSTDKADLRLIYLALAHMIKFRGHFLIEGDLNPDNSDVDKLFIQLVQTYNQLFEENPINASGVDAKAILSARLSKSRRLENLIAQLPGEKKNGLFGNLIALSLGLTPNFKSNFDLAEDAKLQLSKDTYDDDLDNLLAQIGDQYADLFLAAKNLSDAILLSDILRVNTEITKAPLSASMIKRYDEHHQDLTLLKALVRQQLPEKYKEIFFDQSKNGYAGYIDGGASQEEFYKFIKPILEKMDGTEELLVKLNREDLLRKQRTFDNGSIPHQIHLGELHAILRRQEDFYPFLKDNREKIEKILTFRIPYYVGPLARGNSRFAWMTRKSEETITPWNFEEVVDKGASAQSFIERMTNFDKNLPNEKVLPKHSLLYEYFTVYNELTKVKYVTEGMRKPAFLSGEQKKAIVDLLFKTNRKVTVKQLKEDYFKKIECFDSVEISGVEDRFNASLGTYHDLLKIIKDKDFLDNEENEDILEDIVLTLTLFEDREMIEERLKTYAHLFDDKVMKQLKRRRYTGWGRLSRKLINGIRDKQSGKTILDFLKSDGFANRNFMQLIHDDSLTFKEDIQKAQVSGQGDSLHEHIANLAGSPAIKKGILQTVKVVDELVKVMGRHKPENIVIEMARENQTTQKGQKNSRERMKRIEEGIKELGSQILKEHPVENTQLQNEKLYLYYLQNGRDMYVDQELDINRLSDYDVDHIVPQSFLKDDSIDNKVLTRSDKNRGKSDNVPSEEVVKKMKNYWRQLLNAKLITQRKFDNLTKAERGGLSELDKAGFIKRQLVETRQITKHVAQILDSRMNTKYDENDKLIREVKVITLKSKLVSDFRKDFQFYKVREINNYHHAHDAYLNAVVGTALIKKYPKLESEFVYGDYKVYDVRKMIAKSEQEIGKATAKYFFYSNIMNFFKTEITLANGEIRKRPLIETNGETGEIVWDKGRDFATVRKVLSMPQVNIVKKTEVQTGGFSKESILPKRNSDKLIARKKDWDPKKYGGFDSPTVAYSVLVVAKVEKGKSKKLKSVKELLGITIMERSSFEKNPIDFLEAKGYKEVKKDLIIKLPKYSLFELENGRKRMLASAGELQKGNELALPSKYVNFLYLASHYEKLKGGSSGSETPGTSESATPESSGSEVEFSHEYWMRHALTLAKRARDEREVPVGAVLVLNNRVIGEGWNRAIGLHDPTAHAEIMALRQGGLVMQNYRLIDATLYVTFEPCVMCAGAMIHSRIGRVVFGVRNAKTGAAGSLMDVLHYPGMNHRVEITEGILADECAALLCYFFRMPRQVFNAQKKAQSSTDSPEDNEQKQLFVEQHKHYLDEIIEQISEFSKRVILADANLDKVLSAYNKHRDKPIREQAENIIHLFTLTNLGAPAAFKYFDTTIDRKRYTSTKEVLDATLIHQSITGLYETRIDLSQLGGD

SEQ ID NO: 160 - protein, 1554 aa, Artificial Sequence
  Description of Artificial Sequence: Synthetic polypeptide
MDKKYSIGLAIGTNSVGWAVITDEYKVPSKKFKVLGNTDRHSIKKNLIGALLFDSGETAEATRLKRTARRRYTRRKNRICYLQEIFSNEMAKVDDSFFHRLEESFLVEEDKKHERHPIFGNIVDEVAYHEKYPTIYHLRKKLVDSTDKADLRLIYLALAHMIKFRGHFLIEGDLNPDNSDVDKLFIQLVQTYNQLFEENPINASGVDAKAILSARLSKSRRLENLIAQLPGEKKNGLFGNLIALSLGLTPNFKSNFDLAEDAKLQLSKDTYDDDLDNLLAQIGDQYADLFLAAKNLSDAILLSDILRVNTEITKAPLSASMIKRYDEHHQDLTLLKALVRQQLPEKYKEIFFDQSKNGYAGYIDGGASQEEFYKFIKPILEKMDGTEELLVKLNREDLLRKQRTFDNGSIPHQIHLGELHAILRRQEDFYPFLKDNREKIEKILTFRIPYYVGPLARGNSRFAWMTRKSEETITPWNFEEVVDKGASAQSFIERMTNFDKNLPNEKVLPKHSLLYEYFTVYNELTKVKYVTEGMRKPAFLSGEQKKAIVDLLFKTNRKVTVKQLKEDYFKKIECFDSVEISGVEDRFNASLGTYHDLLKIIKDKDFLDNEENEDILEDIVLTLTLFEDREMIEERLKTYAHLFDDKVMKQLKRRRYTGWGRLSRKLINGIRDKQSGKTILDFLKSDGFANRNFMQLIHDDSLTFKEDIQKAQVSGQGDSLHEHIANLAGSPAIKKGILQTVKVVDELVKVMGRHKPENIVIEMARENQTTQKGQKNSRERMKRIEEGIKELGSQILKEHPVENTQLQNEKLYLYYLQNGRDMYVDQELDINRLSDYDVDHIVPQSFLKDDSIDNKVLTRSDKNRGKSDNVPSEEVVKKMKNYWRQLLNAKLITQRKFDNLTKAERGGLSELDKAGFIKRQLVETRQITKHVAQILDSRMNTKYDENDKLIREVKVITLKSKLVSDFRKDFQFYKVREINNYHHAHDAYLNAVVGTALIKKYPKLESEFVYGDYKVYDVRKMIAKSEQEIGKATAKYFFYSNIMNFFKTEITLANGSSGSETPGTSESATPESSGSEVEFSHEYWMRHALTLAKRARDEREVPVGAVLVLNNRVIGEGWNRAIGLHDPTAHAEIMALRQGGLVMQNYRLIDATLYVTFEPCVMCAGAMIHSRIGRVVFGVRNAKTGAAGSLMDVLHYPGMNHRVEITEGILADECAALLCYFFRMPRQVFNAQKKAQSSTDGEIRKRPLIETNGETGEIVWDKGRDFATVRKVLSMPQVNIVKKTEVQTGGFSKESILPKRNSDKLIARKKDWDPKKYGGFDSPTVAYSVLVVAKVEKGKSKKLKSVKELLGITIMERSSFEKNPIDFLEAKGYKEVKKDLIIKLPKYSLFELENGRKRMLASAGELQKGNELALPSKYVNFLYLASHYEKLKGSPEDNEQKQLFVEQHKHYLDEIIEQISEFSKRVILADANLDKVLSAYNKHRDKPIREQAENIIHLFTLTNLGAPAAFKYFDTTIDRKRYTSTKEVLDATLIHQSITGLYETRIDLSQLGGD

SEQ ID NO: 161 - protein, 1554 aa, Artificial Sequence
  Description of Artificial Sequence: Synthetic polypeptide
MDKKYSIGLAIGTNSVGWAVITDEYKVPSKKFKVLGNTDRHSIKKNLIGALLFDSGETAEATRLKRTARRRYTRRKNRICYLQEIFSNEMAKVDDSFFHRLEESFLVEEDKKHERHPIFGNIVDEVAYHEKYPTIYHLRKKLVDSTDKADLRLIYLALAHMIKFRGHFLIEGDLNPDNSDVDKLFIQLVQTYNQLFEENPINASGVDAKAILSARLSKSRRLENLIAQLPGEKKNGLFGNLIALSLGLTPNFKSNFDLAEDAKLQLSKDTYDDDLDNLLAQIGDQYADLFLAAKNLSDAILLSDILRVNTEITKAPLSASMIKRYDEHHQDLTLLKALVRQQLPEKYKEIFFDQSKNGYAGYIDGGASQEEFYKFIKPILEKMDGTEELLVKLNREDLLRKQRTFDNGSIPHQIHLGELHAILRRQEDFYPFLKDNREKIEKILTFRIPYYVGPLARGNSRFAWMTRKSEETITPWNFEEVVDKGASAQSFIERMTNFDKNLPNEKVLPKHSLLYEYFTVYNELTKVKYVTEGMRKPAFLSGEQKKAIVDLLFKTNRKVTVKQLKEDYFKKIECFDSVEISGVEDRFNASLGTYHDLLKIIKDKDFLDNEENEDILEDIVLTLTLFEDREMIEERLKTYAHLFDDKVMKQLKRRRYTGWGRLSRKLINGIRDKQSGKTILDFLKSDGFANRNFMQLIHDDSLTFKEDIQKAQVSGQGDSLHEHIANLAGSPAIKKGILQTVKVVDELVKVMGRHKPENIVIEMARENQTTQKGQKNSRERMKRIEEGIKELGSQILKEHPVENTQLQNEKLYLYYLQNGRDMYVDQELDINRLSDYDVDHIVPQSFLKDDSIDNKVLTRSDKNRGKSDNVPSEEVVKKMKNYWRQLLNAKLITQRKFDNLTKAERGGLSELDKAGFIKRQLVETRQITKHVAQILDSRMNTKYDENDKLIREVKVITLKSKLVSDFRKDFQFYKVREINNYHHAHDAYLNAVVGTALIKKYPKLESEFVYGDYKVYDVRKMIAKSEGSSGSETPGTSESATPESSGSEVEFSHEYWMRHALTLAKRARDEREVPVGAVLVLNNRVIGEGWNRAIGLHDPTAHAEIMALRQGGLVMQNYRLIDATLYVTFEPCVMCAGAMIHSRIGRVVFGVRNAKTGAAGSLMDVLHYPGMNHRVEITEGILADECAALLCYFFRMPRQVFNAQKKAQSSTDQEIGKATAKYFFYSNIMNFFKTEITLANGEIRKRPLIETNGETGEIVWDKGRDFATVRKVLSMPQVNIVKKTEVQTGGFSKESILPKRNSDKLIARKKDWDPKKYGGFDSPTVAYSVLVVAKVEKGKSKKLKSVKELLGITIMERSSFEKNPIDFLEAKGYKEVKKDLIIKLPKYSLFELENGRKRMLASAGELQKGNELALPSKYVNFLYLASHYEKLKGSPEDNEQKQLFVEQHKHYLDEIIEQISEFSKRVILADANLDKVLSAYNKHRDKPIREQAENIIHLFTLTNLGAPAAFKYFDTTIDRKRYTSTKEVLDATLIHQSITGLYETRIDLSQLGGD

SEQ ID NO: 162 - protein, 1540 aa, Artificial Sequence
  Description of Artificial Sequence: Synthetic polypeptide
MDKKYSIGLAIGTNSVGWAVITDEYKVPSKKFKVLGNTDRHSIKKNLIGALLFDSGETAEATRLKRTARRRYTRRKNRICYLQEIFSNEMAKVDDSFFHRLEESFLVEEDKKHERHPIFGNIVDEVAYHEKYPTIYHLRKKLVDSTDKADLRLIYLALAHMIKFRGHFLIEGDLNPDNSDVDKLFIQLVQTYNQLFEENPINASGVDAKAILSARLSKSRRLENLIAQLPGEKKNGLFGNLIALSLGLTPNFKSNFDLAEDAKLQLSKDTYDDDLDNLLAQIGDQYADLFLAAKNLSDAILLSDILRVNTEITKAPLSASMIKRYDEHHQDLTLLKALVRQQLPEKYKEIFFDQSKNGYAGYIDGGASQEEFYKFIKPILEKMDGTEELLVKLNREDLLRKQRTFDNGSIPHQIHLGELHAILRRQEDFYPFLKDNREKIEKILTFRIPYYVGPLARGNSRFAWMTRKSEETITPWNFEEVVDKGASAQSFIERMTNFDKNLPNEKVLPKHSLLYEYFTVYNELTKVKYVTEGMRKPAFLSGEQKKAIVDLLFKTNRKVTVKQLKEDYFKKIECFDSVEISGVEDRFNASLGTYHDLLKIIKDKDFLDNEENEDILEDIVLTLTLFEDREMIEERLKTYAHLFDDKVMKQLKRRRYTGWGRLSRKLINGIRDKQSGKTILDFLKSDGFANRNFMQLIHDDSLTFKEDIQKAQVSGQGDSLHEHIANLAGSPAIKKGILQTVKVVDELVKVMGRHKPENIVIEMARENQGSSGSETPGTSESATPESSGSEVEFSHEYWMRHALTLAKRARDEREVPVGAVLVLNNRVIGEGWNRAIGLHDPTAHAEIMALRQGGLVMQNYRLIDATLYVTFEPCVMCAGAMIHSRIGRVVFGVRNAKTGAAGSLMDVLHYPGMNHRVEITEGILADECAALLCYFFRMPRTTQKGQKNSRERMKRIEEGIKELGSQILKEHPVENTQLQNEKLYLYYLQNGRDMYVDQELDINRLSDYDVDHIVPQSFLKDDSIDNKVLTRSDKNRGKSDNVPSEEVVKKMKNYWRQLLNAKLITQRKFDNLTKAERGGLSELDKAGFIKRQLVETRQITKHVAQILDSRMNTKYDENDKLIREVKVITLKSKLVSDFRKDFQFYKVREINNYHHAHDAYLNAVVGTALIKKYPKLESEFVYGDYKVYDVRKMIAKSEQEIGKATAKYFFYSNIMNFFKTEITLANGEIRKRPLIETNGETGEIVWDKGRDFATVRKVLSMPQVNIVKKTEVQTGGFSKESILPKRNSDKLIARKKDWDPKKYGGFDSPTVAYSVLVVAKVEKGKSKKLKSVKELLGITIMERSSFEKNPIDFLEAKGYKEVKKDLIIKLPKYSLFELENGRKRMLASAGELQKGNELALPSKYVNFLYLASHYEKLKGSPEDNEQKQLFVEQHKHYLDEIIEQISEFSKRVILADANLDKVLSAYNKHRDKPIREQAENIIHLFTLTNLGAPAAFKYFDTTIDRKRYTSTKEVLDATLIHQSITGLYETRIDLSQLGGD

SEQ ID NO: 163 - protein, 1540 aa, Artificial Sequence
  Description of Artificial Sequence: Synthetic polypeptide
MDKKYSIGLAIGTNSVGWAVITDEYKVPSKKFKVLGNTDRHSIKKNLIGALLFDSGETAEATRLKRTARRRYTRRKNRICYLQEIFSNEMAKVDDSFFHRLEESFLVEEDKKHERHPIFGNIVDEVAYHEKYPTIYHLRKKLVDSTDKADLRLIYLALAHMIKFRGHFLIEGDLNPDNSDVDKLFIQLVQTYNQLFEENPINASGVDAKAILSARLSKSRRLENLIAQLPGEKKNGLFGNLIALSLGLTPNFKSNFDLAEDAKLQLSKDTYDDDLDNLLAQIGDQYADLFLAAKNLSDAILLSDILRVNTEITKAPLSASMIKRYDEHHQDLTLLKALVRQQLPEKYKEIFFDQSKNGYAGYIDGGASQEEFYKFIKPILEKMDGTEELLVKLNREDLLRKQRTFDNGSIPHQIHLGELHAILRRQEDFYPFLKDNREKIEKILTFRIPYYVGPLARGNSRFAWMTRKSEETITPWNFEEVVDKGASAQSFIERMTNFDKNLPNEKVLPKHSLLYEYFTVYNELTKVKYVTEGMRKPAFLSGEQKKAIVDLLFKTNRKVTVKQLKEDYFKKIECFDSVEISGVEDRFNASLGTYHDLLKIIKDKDFLDNEENEDILEDIVLTLTLFEDREMIEERLKTYAHLFDDKVMKQLKRRRYTGWGRLSRKLINGIRDKQSGKTILDFLKSDGFANRNFMQLIHDDSLTFKEDIQKAQVSGQGDSLHEHIANLAGSPAIKKGILQTVKVVDELVKVMGRHKPENIVIEMARENQTTQKGQKNSRERMKRIEEGIKELGSQILKEHPVENTQLQNEKLYLYYLQNGRDMYVDQELDINRLSDYDVDHIVPQSFLKDDSIDNKVLTRSDKNRGKSDNVPSEEVVKKMKNYWRQLLNAKLITQRKFDNLTKAERGGLSELDKAGFIKRQLVETRQITKHVAQILDSRMNTKYDENDKLIREVKVITLKSKLVSDFRKDFQFYKVREINNYHHAHDAYLNAVVGTALIKKYPKLESEFVYGDYKVYDVRKMIAKSEQEIGKATAKYFFYSNIMNFFKTEITLANGEIRKRPLIETNGETGEIVWDKGRDFATVRKVLSMPQVNIVKKTEVQTGGFSKESILPKRNSDKLIARKKDWDPKKYGGFDSPTVAYSVLVVAKVEKGKSKKLKSVKELLGITIMERSSFEKNPIDFLEAKGYKEVKKDLIIKLPKYSLFELENGRKRMLASAGELQKGNELALPSKYVNFLYLASHYEKLKGSPGSSGSETPGTSESATPESSGSEVEFSHEYWMRHALTLAKRARDEREVPVGAVLVLNNRVIGEGWNRAIGLHDPTAHAEIMALRQGGLVMQNYRLIDATLYVTFEPCVMCAGAMIHSRIGRVVFGVRNAKTGAAGSLMDVLHYPGMNHRVEITEGILADECAALLCYFFRMPREDNEQKQLFVEQHKHYLDEIIEQISEFSKRVILADANLDKVLSAYNKHRDKPIREQAENIIHLFTLTNLGAPAAFKYFDTTIDRKRYTSTKEVLDATLIHQSITGLYETRIDLSQLGGD

SEQ ID NO: 164 - protein, 1543 aa, Artificial Sequence
  Description of Artificial Sequence: Synthetic polypeptide
MDKKYSIGLAIGTNSVGWAVITDEYKVPSKKFKVLGNTDRHSIKKNLIGALLFDSGETAEATRLKRTARRRYTRRKNRICYLQEIFSNEMAKVDDSFFHRLEESFLVEEDKKHERHPIFGNIVDEVAYHEKYPTIYHLRKKLVDSTDKADLRLIYLALAHMIKFRGHFLIEGDLNPDNSDVDKLFIQLVQTYNQLFEENPINASGVDAKAILSARLSKSRRLENLIAQLPGEKKNGLFGNLIALSLGLTPNFKSNFDLAEDAKLQLSKDTYDDDLDNLLAQIGDQYADLFLAAKNLSDAILLSDILRVNTEITKAPLSASMIKRYDEHHQDLTLLKALVRQQLPEKYKEIFFDQSKNGYAGYIDGGASQEEFYKFIKPILEKMDGTEELLVKLNREDLLRKQRTFDNGSIPHQIHLGELHAILRRQEDFYPFLKDNREKIEKILTFRIPYYVGPLARGNSRFAWMTRKSEETITPWNFEEVVDKGASAQSFIERMTNFDKNLPNEKVLPKHSLLYEYFTVYNELTKVKYVTEGMRKPAFLSGEQKKAIVDLLFKTNRKVTVKQLKEDYFKKIECFDSVEISGVEDRFNASLGTYHDLLKIIKDKDFLDNEENEDILEDIVLTLTLFEDREMIEERLKTYAHLFDDKVMKQLKRRRYTGWGRLSRKLINGIRDKQSGKTILDFLKSDGFANRNFMQLIHDDSLTFKEDIQKAQVSGQGDSLHEHIANLAGSPAIKKGILQTVKVVDELVKVMGRHKPENIVIEMARENQTTQKGQKNSRERMKRIEEGIKELGSQILKEHPVENTQLQNEKLYLYYLQNGRDMYVDQELDINRLSDYDVDHIVPQSFLKDDSIDNKVLTRSDKNRGKSDNVPSEEVVKKMKNYWRQLLNAKLITQRKFDNLTKAERGGLSELDKAGFIKRQLVETRQITKHVAQILDSRMNTKYDENDKLIREVKVITLKSKLVSDFRKDFQFYKVREINNYHHAHDAYLNAVVGTALIKKYPKLESEFVYGDYKVYDVRKMIAKSEQEIGKATAKYFFYSNIMNFFKTEITLANGEIRKRPLIETNGETGEIVWDKGRDFATVRKVLSMPQVNIVKKTEVQTGGFSKESILPKRNSDKLIARKKDWDPKKYGGFDSPTVAYSVLVVAKVEKGKSKKLKSVKELLGITIMERSSFEKNPIDFLEAKGYKEVKKDLIIKLPKYSLFELENGRKRMLASAGELQKGNELALPSKYVNFLYLASHYEKLKGSPGSSGSSGSETPGTSESATPESSGSEVEFSHEYWMRHALTLAKRARDEREVPVGAVLVLNNRVIGEGWNRAIGLHDPTAHAEIMALRQGGLVMQNYRLIDATLYVTFEPCVMCAGAMIHSRIGRVVFGVRNAKTGAAGSLMDVLHYPGMNHRVEITEGILADECAALLCYFFRMPREDNEQKQLFVEQHKHYLDEIIEQISEFSKRVILADANLDKVLSAYNKHRDKPIREQAENIIHLFTLTNLGAPAAFKYFDTTIDRKRYTSTKEVLDATLIHQSITGLYETRIDLSQLGGD

SEQ ID NO: 165 - protein, 1546 aa, Artificial Sequence
  Description of Artificial Sequence: Synthetic polypeptide
MDKKYSIGLAIGTNSVGWAVITDEYKVPSKKFKVLGNTDRHSIKKNLIGALLFDSGETAEATRLKRTARRRYTRRKNRICYLQEIFSNEMAKVDDSFFHRLEESFLVEEDKKHERHPIFGNIVDEVAYHEKYPTIYHLRKKLVDSTDKADLRLIYLALAHMIKFRGHFLIEGDLNPDNSDVDKLFIQLVQTYNQLFEENPINASGVDAKAILSARLSKSRRLENLIAQLPGEKKNGLFGNLIALSLGLTPNFKSNFDLAEDAKLQLSKDTYDDDLDNLLAQIGDQYADLFLAAKNLSDAILLSDILRVNTEITKAPLSASMIKRYDEHHQDLTLLKALVRQQLPEKYKEIFFDQSKNGYAGYIDGGASQEEFYKFIKPILEKMDGTEELLVKLNREDLLRKQRTFDNGSIPHQIHLGELHAILRRQEDFYPFLKDNREKIEKILTFRIPYYVGPLARGNSRFAWMTRKSEETITPWNFEEVVDKGASAQSFIERMTNFDKNLPNEKVLPKHSLLYEYFTVYNELTKVKYVTEGMRKPAFLSGEQKKAIVDLLFKTNRKVTVKQLKEDYFKKIECFDSVEISGVEDRFNASLGTYHDLLKIIKDKDFLDNEENEDILEDIVLTLTLFEDREMIEERLKTYAHLFDDKVMKQLKRRRYTGWGRLSRKLINGIRDKQSGKTILDFLKSDGFANRNFMQLIHDDSLTFKEDIQKAQVSGQGDSLHEHIANLAGSPAIKKGILQTVKVVDELVKVMGRHKPENIVIEMARENQTTQKGQKNSRERMKRIEEGIKELGSQILKEHPVENTQLQNEKLYLYYLQNGRDMYVDQELDINRLSDYDVDHIVPQSFLKDDSIDNKVLTRSDKNRGKSDNVPSEEVVKKMKNYWRQLLNAKLITQRKFDNLTKAERGGLSELDKAGFIKRQLVETRQITKHVAQILDSRMNTKYDENDKLIREVKVITLKSKLVSDFRKDFQFYKVREINNYHHAHDAYLNAVVGTALIKKYPKLESEFVYGDYKVYDVRKMIAKSEQEIGKATAKYFFYSNIMNFFKTEITLANGEIRKRPLIETNGETGEIVWDKGRDFATVRKVLSMPQVNIVKKTEVQTGGFSKESILPKRNSDKLIARKKDWDPKKYGGFDSPTVAYSVLVVAKVEKGKSKKLKSVKELLGITIMERSSFEKNPIDFLEAKGYKEVKKDLIIKLPKYSLFELENGRKRMLASAGELQKGNELALPSKYVNFLYLASHYEKLKGSPGSSGSSGSETPGTSESATPESGSSSGSEVEFSHEYWMRHALTLAKRARDEREVPVGAVLVLNNRVIGEGWNRAIGLHDPTAHAEIMALRQGGLVMQNYRLIDATLYVTFEPCVMCAGAMIHSRIGRVVFGVRNAKTGAAGSLMDVLHYPGMNHRVEITEGILADECAALLCYFFRMPREDNEQKQLFVEQHKHYLDEIIEQISEFSKRVILADANLDKVLSAYNKHRDKPIREQAENIIHLFTLTNLGAPAAFKYFDTTIDRKRYTSTKEVLDATLIHQSITGLYETRIDLSQLGGD

SEQ ID NO: 166 - protein, 1546 aa, Artificial Sequence
  Description of Artificial Sequence: Synthetic polypeptide
MDKKYSIGLAIGTNSVGWAVITDEYKVPSKKFKVLGNTDRHSIKKNLIGALLFDSGETAEATRLKRTARRRYTRRKNRICYLQEIFSNEMAKVDDSFFHRLEESFLVEEDKKHERHPIFGNIVDEVAYHEKYPTIYHLRKKLVDSTDKADLRLIYLALAHMIKFRGHFLIEGDLNPDNSDVDKLFIQLVQTYNQLFEENPINASGVDAKAILSARLSKSRRLENLIAQLPGEKKNGLFGNLIALSLGLTPNFKSNFDLAEDAKLQLSKDTYDDDLDNLLAQIGDQYADLFLAAKNLSDAILLSDILRVNTEITKAPLSASMIKRYDEHHQDLTLLKALVRQQLPEKYKEIFFDQSKNGYAGYIDGGASQEEFYKFIKPILEKMDGTEELLVKLNREDLLRKQRTFDNGSIPHQIHLGELHAILRRQEDFYPFLKDNREKIEKILTFRIPYYVGPLARGNSRFAWMTRKSEETITPWNFEEVVDKGASAQSFIERMTNFDKNLPNEKVLPKHSLLYEYFTVYNELTKVKYVTEGMRKPAFLSGEQKKAIVDLLFKTNRKVTVKQLKEDYFKKIECFDSVEISGVEDRFNASLGTYHDLLKIIKDKDFLDNEENEDILEDIVLTLTLFEDREMIEERLKTYAHLFDDKVMKQLKRRRYTGWGRLSRKLINGIRDKQSGKTILDFLKSDGFANRNFMQLIHDDSLTFKEDIQKAQVSGQGDSLHEHIANLAGSPAIKKGILQTVKVVDELVKVMGRHKPENIVIEMARENQTTQKGQKNSRERMKRIEEGIKELGSQILKEHPVENTQLQNEKLYLYYLQNGRDMYVDQELDINRLSDYDVDHIVPQSFLKDDSIDNKVLTRSDKNRGKSDNVPSEEVVKKMKNYWRQLLNAKLITQRKFDNLTKAERGGLSELDKAGFIKRQLVETRQITKHVAQILDSRMNTKYDENDKLIREVKVITLKSKLVSDFRKDFQFYKVREINNYHHAHDAYLNAVVGTALIKKYPKLESEFVYGDYKVYDVRKMIAKSEQEIGKATAKYFFYSNIMNFFKTEITLANGEIRKRPLIETNGETGEIVWDKGRDFATVRKVLSMPQVNIVKKTEVQTGGFSKESILPKRNSDKLIARKKDWDPKKYGGFDSPTVAYSVLVVAKVEKGKSKKLKSVKELLGITIMERSSFEKNPIDFLEAKGYKEVKKDLIIKLPKYSLFELENGRKRMLASAGELQKGNELALPSKYVNFLYLASHYEKLKGSPGSSGSSGSETPGTSESATPESGSSSGSEVEFSHEYWMRHALTLAKRARDEREVPVGAVLVLNNRVIGEGWNRAIGLHDPTAHAEIMALRQGGLVMQNYRLIDATLYVTFEPCVMCAGAMIHSRIGRVVFGVRNAKTGAAGSLMDVLHYPGMNHRVEITEGILADECAALLCYFFRMRREDNEQKQLFVEQHKHYLDEIIEQISEFSKRVILADANLDKVLSAYNKHRDKPIREQAENIIHLFTLTNLGAPAAFKYFDTTIDRKRYTSTKEVLDATLIHQSITGLYETRIDLSQLGGD

SEQ ID NO: 167 - protein, 1546 aa, Artificial Sequence
  Description of Artificial Sequence: Synthetic polypeptide
MDKKYSIGLAIGTNSVGWAVITDEYKVPSKKFKVLGNTDRHSIKKNLIGALLFDSGETAEATRLKRTARRRYTRRKNRICYLQEIFSNEMAKVDDSFFHRLEESFLVEEDKKHERHPIFGNIVDEVAYHEKYPTIYHLRKKLVDSTDKADLRLIYLALAHMIKFRGHFLIEGDLNPDNSDVDKLFIQLVQTYNQLFEENPINASGVDAKAILSARLSKSRRLENLIAQLPGEKKNGLFGNLIALSLGLTPNFKSNFDLAEDAKLQLSKDTYDDDLDNLLAQIGDQYADLFLAAKNLSDAILLSDILRVNTEITKAPLSASMIKRYDEHHQDLTLLKALVRQQLPEKYKEIFFDQSKNGYAGYIDGGASQEEFYKFIKPILEKMDGTEELLVKLNREDLLRKQRTFDNGSIPHQIHLGELHAILRRQEDFYPFLKDNREKIEKILTFRIPYYVGPLARGNSRFAWMTRKSEETITPWNFEEVVDKGASAQSFIERMTNFDKNLPNEKVLPKHSLLYEYFTVYNELTKVKYVTEGMRKPAFLSGEQKKAIVDLLFKTNRKVTVKQLKEDYFKKIECFDSVEISGVEDRFNASLGTYHDLLKIIKDKDFLDNEENEDILEDIVLTLTLFEDREMIEERLKTYAHLFDDKVMKQLKRRRYTGWGRLSRKLINGIRDKQSGKTILDFLKSDGFANRNFMQLIHDDSLTFKEDIQKAQVSGQGDSLHEHIANLAGSPAIKKGILQTVKVVDELVKVMGRHKPENIVIEMARENQTTQKGQKNSRERMKRIEEGIKELGSQILKEHPVENTQLQNEKLYLYYLQNGRDMYVDQELDINRLSDYDVDHIVPQSFLKDDSIDNKVLTRSDKNRGKSDNVPSEEVVKKMKNYWRQLLNAKLITQRKFDNLTKAERGGLSELDKAGFIKRQLVETRQITKHVAQILDSRMNTKYDENDKLIREVKVITLKSKLVSDFRKDFQFYKVREINNYHHAHDAYLNAVVGTALIKKYPKLESEFVYGDYKVYDVRKMIAKSEQEIGKATAKYFFYSNIMNFFKTEITLANGEIRKRPLIETNGETGEIVWDKGRDFATVRKVLSMPQVNIVKKTEVQTGGFSKESILPKRNSDKLIARKKDWDPKKYGGFDSPTVAYSVLVVAKVEKGKSKKLKSVKELLGITIMERSSFEKNPIDFLEAKGYKEVKKDLIIKLPKYSLFELENGRKRMLASAGELQKGNELALPSKYVNFLYLASHYEKLKGSGSSGSSGSETPGTSESATPESGSSSGSEVEFSHEYWMRHALTLAKRARDEREVPVGAVLVLNNRVIGEGWNRAIGLHDPTAHAEIMALRQGGLVMQNYRLIDATLYVTFEPCVMCAGAMIHSRIGRVVFGVRNAKTGAAGSLMDVLHYPGMNHRVEITEGILADECAALLCYFFRMRRPEDNEQKQLFVEQHKHYLDEIIEQISEFSKRVILADANLDKVLSAYNKHRDKPIREQAENIIHLFTLTNLGAPAAFKYFDTTIDRKRYTSTKEVLDATLIHQSITGLYETRIDLSQLGGD

SEQ ID NO: 168 - protein, 1551 aa, Artificial Sequence
  Description of Artificial Sequence: Synthetic polypeptide
MDKKYSIGLAIGTNSVGWAVITDEYKVPSKKFKVLGNTDRHSIKKNLIGALLFDSGETAEATRLKRTARRRYTRRKNRICYLQEIFSNEMAKVDDSFFHRLEESFLVEEDKKHERHPIFGNIVDEVAYHEKYPTIYHLRKKLVDSTDKADLRLIYLALAHMIKFRGHFLIEGDLNPDNSDVDKLFIQLVQTYNQLFEENPINASGVDAKAILSARLSKSRRLENLIAQLPGEKKNGLFGNLIALSLGLTPNFKSNFDLAEDAKLQLSKDTYDDDLDNLLAQIGDQYADLFLAAKNLSDAILLSDILRVNTEITKAPLSASMIKRYDEHHQDLTLLKALVRQQLPEKYKEIFFDQSKNGYAGYIDGGASQEEFYKFIKPILEKMDGTEELLVKLNREDLLRKQRTFDNGSIPHQIHLGELHAILRRQEDFYPFLKDNREKIEKILTFRIPYYVGPLARGNSRFAWMTRKSEETITPWNFEEVVDKGASAQSFIERMTNFDKNLPNEKVLPKHSLLYEYFTVYNELTKVKYVTEGMRKPAFLSGEQKKAIVDLLFKTNRKVTVKQLKEDYFKKIECFDSVEISGVEDRFNASLGTYHDLLKIIKDKDFLDNEENEDILEDIVLTLTLFEDREMIEERLKTYAHLFDDKVMKQLKRRRYTGWGRLSRKLINGIRDKQSGKTILDFLKSDGFANRNFMQLIHDDSLTFKEDIQKAQVSGQGDSLHEHIANLAGSPAIKKGILQTVKVVDELVKVMGRHKPENIVIEMARENQTTQKGQKNSRERMKRIEEGIKELGSQILKEHPVENTQLQNEKLYLYYLQNGRDMYVDQELDINRLSDYDVDHIVPQSFLKDDSIDNKVLTRSDKNRGKSDNVPSEEVVKKMKNYWRQLLNAKLITQRKFDNLTKAERGGLSELDKAGFIKRQLVETRQITKHVAQILDSRMNTKYDENDKLIREVKVITLKSKLVSDFRKDFQFYKVREINNYHHAHDAYLNAVVGTALIKKYPKLESEFVYGDYKVYDVRKMIAKSEQEIGKATAKYFFYSNIMNFFKTEITLANGEIRKRPLIETNGETGEIVWDKGRDFATVRKVLSMPQVNIVKKTEVQTGGFSKESILPKRNSDKLIARKKDWDPKKYGGFDSPTVAYSVLVVAKVEKGKSKKLKSVKELLGITIMERSSFEKNPIDFLEAKGYKEVKKDLIIKLPKYSLFELENGRKRMLASAGELQKGNELALPSKYVNFLYLASHYEKLKGSPGSSGSSGSETPGTSESATPESGSSGSEVEFSHEYWMRHALTLAKRARDEREVPVGAVLVLNNRVIGEGWNRAHAEIMALRQGGLVMQNYRLIDATLYVTFEPCVMCAGAMIHSRIGRVVFGVRNAKTGAAGSLMDVLHYPGMNHRVEITEGILADECAALLCYFFRMPRQVFNAQKKAQSSTDEDNEQKQLFVEQHKHYLDEIIEQISEFSKRVILADANLDKVLSAYNKHRDKPIREQAENIIHLFTLTNLGAPAAFKYFDTTIDRKRYTSTKEVLDATLIHQSITGLYETRIDLSQLGGD

SEQ ID NO: 169 - protein, 1546 aa, Artificial Sequence
  Description of Artificial Sequence: Synthetic polypeptide
MDKKYSIGLAIGTNSVGWAVITDEYKVPSKKFKVLGNTDRHSIKKNLIGALLFDSGETAEATRLKRTARRRYTRRKNRICYLQEIFSNEMAKVDDSFFHRLEESFLVEEDKKHERHPIFGNIVDEVAYHEKYPTIYHLRKKLVDSTDKADLRLIYLALAHMIKFRGHFLIEGDLNPDNSDVDKLFIQLVQTYNQLFEENPINASGVDAKAILSARLSKSRRLENLIAQLPGEKKNGLFGNLIALSLGLTPNFKSNFDLAEDAKLQLSKDTYDDDLDNLLAQIGDQYADLFLAAKNLSDAILLSDILRVNTEITKAPLSASMIKRYDEHHQDLTLLKALVRQQLPEKYKEIFFDQSKNGYAGYIDGGASQEEFYKFIKPILEKMDGTEELLVKLNREDLLRKQRTFDNGSIPHQIHLGELHAILRRQEDFYPFLKDNREKIEKILTFRIPYYVGPLARGNSRFAWMTRKSEETITPWNFEEVVDKGASAQSFIERMTNFDKNLPNEKVLPKHSLLYEYFTVYNELTKVKYVTEGMRKPAFLSGEQKKAIVDLLFKTNRKVTVKQLKEDYFKKIECFDSVEISGVEDRFNASLGTYHDLLKIIKDKDFLDNEENEDILEDIVLTLTLFEDREMIEERLKTYAHLFDDKVMKQLKRRRYTGWGRLSRKLINGIRDKQSGKTILDFLKSDGFANRNFMQLIHDDSLTFKEDIQKAQVSGQGDSLHEHIANLAGSPAIKKGILQTVKVVDELVKVMGRHKPENIVIEMARENQTTQKGQKNSRERMKRIEEGIKELGSQILKEHPVENTQLQNEKLYLYYLQNGRDMYVDQELDINRLSDYDVDHIVPQSFLKDDSIDNKVLTRSDKNRGKSDNVPSEEVVKKMKNYWRQLLNAKLITQRKFDNLTKAERGGLSELDKAGFIKRQLVETRQITKHVAQILDSRMNTKYDENDKLIREVKVITLKSKLVSDFRKDFQFYKVREINNYHHAHDAYLNAVVGTALIKKYPKLESEFVYGDYKVYDVRKMIAKSEQEIGKATAKYFFYSNIMNFFKTEITLANGEIRKRPLIETNGETGEIVWDKGRDFATVRKVLSMPQVNIVKKTEVQTGGFSKESILPKRNSDKLIARKKDWDPKKYGGFDSPTVAYSVLVVAKVEKGKSKKLKSVKELLGITIMERSSFEKNPIDFLEAKGYKEVKKDLIIKLPKYSLFELENGRKRMLASAGELQKGNELALPSKYVNFLYLASHYEKLKGSPEGSSGSSGSETPGTSESATPESGSSSGSEVEFSHEYWMRHALTLAKRARDEREVPVGAVLVLNNRVIGEGWNRAIGLHDPTAHAEIMALRQGGLVMQNYRLIDATLYVTFEPCVMCAGAMIHSRIGRVVFGVRNAKTGAAGSLMDVLHYPGMNHRVEITEGILADECAALLCYFFRMRRDNEQKQLFVEQHKHYLDEIIEQISEFSKRVILADANLDKVLSAYNKHRDKPIREQAENIIHLFTLTNLGAPAAFKYFDTTIDRKRYTSTKEVLDATLIHQSITGLYETRIDLSQLGGD

SEQ ID NO: 170 - protein, 1546 aa, Artificial Sequence
  Description of Artificial Sequence: Synthetic polypeptide
MDKKYSIGLAIGTNSVGWAVITDEYKVPSKKFKVLGNTDRHSIKKNLIGALLFDSGETAEATRLKRTARRRYTRRKNRICYLQEIFSNEMAKVDDSFFHRLEESFLVEEDKKHERHPIFGNIVDEVAYHEKYPTIYHLRKKLVDSTDKADLRLIYLALAHMIKFRGHFLIEGDLNPDNSDVDKLFIQLVQTYNQLFEENPINASGVDAKAILSARLSKSRRLENLIAQLPGEKKNGLFGNLIALSLGLTPNFKSNFDLAEDAKLQLSKDTYDDDLDNLLAQIGDQYADLFLAAKNLSDAILLSDILRVNTEITKAPLSASMIKRYDEHHQDLTLLKALVRQQLPEKYKEIFFDQSKNGYAGYIDGGASQEEFYKFIKPILEKMDGTEELLVKLNREDLLRKQRTFDNGSIPHQIHLGELHAILRRQEDFYPFLKDNREKIEKILTFRIPYYVGPLARGNSRFAWMTRKSEETITPWNFEEVVDKGASAQSFIERMTNFDKNLPNEKVLPKHSLLYEYFTVYNELTKVKYVTEGMRKPAFLSGEQKKAIVDLLFKTNRKVTVKQLKEDYFKKIECFDSVEISGVEDRFNASLGTYHDLLKIIKDKDFLDNEENEDILEDIVLTLTLFEDREMIEERLKTYAHLFDDKVMKQLKRRRYTGWGRLSRKLINGIRDKQSGKTILDFLKSDGFANRNFMQLIHDDSLTFKEDIQKAQVSGQGDSLHEHIANLAGSPAIKKGILQTVKVVDELVKVMGRHKPENIVIEMARENQTTQKGQKNSRERMKRIEEGIKELGSQILKEHPVENTQLQNEKLYLYYLQNGRDMYVDQELDINRLSDYDVDHIVPQSFLKDDSIDNKVLTRSDKNRGKSDNVPSEEVVKKMKNYWRQLLNAKLITQRKFDNLTKAERGGLSELDKAGFIKRQLVETRQITKHVAQILDSRMNTKYDENDKLIREVKVITLKSKLVSDFRKDFQFYKVREINNYHHAHDAYLNAVVGTALIKKYPKLESEFVYGDYKVYDVRKMIAKSEQEIGKATAKYFFYSNIMNFFKTEITLANGEIRKRPLIETNGETGEIVWDKGRDFATVRKVLSMPQVNIVKKTEVQTGGFSKESILPKRNSDKLIARKKDWDPKKYGGFDSPTVAYSVLVVAKVEKGKSKKLKSVKELLGITIMERSSFEKNPIDFLEAKGYKEVKKDLIIKLPKYSLFELENGRKRMLASAGELQKGNELALPSKYVNFLYLASHYEKLKGSPEDGSSGSSGSETPGTSESATPESGSSSGSEVEFSHEYWMRHALTLAKRARDEREVPVGAVLVLNNRVIGEGWNRAIGLHDPTAHAEIMALRQGGLVMQNYRLIDATLYVTFEPCVMCAGAMIHSRIGRVVFGVRNAKTGAAGSLMDVLHYPGMNHRVEITEGILADECAALLCYFFRMRRNEQKQLFVEQHKHYLDEIIEQISEFSKRVILADANLDKVLSAYNKHRDKPIREQAENIIHLFTLTNLGAPAAFKYFDTTIDRKRYTSTKEVLDATLIHQSITGLYETRIDLSQLGGD

SEQ ID NO: 171 - protein, 1533 aa, Artificial Sequence
  Description of Artificial Sequence: Synthetic polypeptide
MDKKYSIGLAIGTNSVGWAVITDEYKVPSKKFKVLGNTDRHSIKKNLIGALLFDSGETAEATRLKRTARRRYTRRKNRICYLQEIFSNEMAKVDDSFFHRLEESFLVEEDKKHERHPIFGNIVDEVAYHEKYPTIYHLRKKLVDSTDKADLRLIYLALAHMIKFRGHFLIEGDLNPDNSDVDKLFIQLVQTYNQLFEENPINASGVDAKAILSARLSKSRRLENLIAQLPGEKKNGLFGNLIALSLGLTPNFKSNFDLAEDAKLQLSKDTYDDDLDNLLAQIGDQYADLFLAAKNLSDAILLSDILRVNTEITKAPLSASMIKRYDEHHQDLTLLKALVRQQLPEKYKEIFFDQSKNGYAGYIDGGASQEEFYKFIKPILEKMDGTEELLVKLNREDLLRKQRTFDNGSIPHQIHLGELHAILRRQEDFYPFLKDNREKIEKILTFRIPYYVGPLARGNSRFAWMTRKSEETITPWNFEEVVDKGASAQSFIERMTNFDKNLPNEKVLPKHSLLYEYFTVYNELTKVKYVTEGMRKPAFLSGEQKKAIVDLLFKTNRKVTVKQLKEDYFKKIECFDSVEISGVEDRFNASLGTYHDLLKIIKDKDFLDNEENEDILEDIVLTLTLFEDREMIEERLKTYAHLFDDKVMKQLKRRRYTGWGRLSRKLINGIRDKQSGKTILDFLKSDGFANRNFMQLIHDDSLTFKEDIQKAQVSGQGDSLHEHIANLAGSPAIKKGILQTVKVVDELVKVMGRHKPENIVIEMARENQTTQKGQKNSRERMKRIEEGIKELGSQILKEHPVENTQLQNEKLYLYYLQNGRDMYVDQELDINRLSDYDVDHIVPQSFLKDDSIDNKVLTRSDKNRGKSDNVPSEEVVKKMKNYWRQLLNAKLITQRKFDNLTKAERGGLSELDKAGFIKRQLVETRQITKHVAQILDSRMNTKYDENDKLIREVKVITLKSKLVSDFRKDFQFYKVREINNYHHAHDAYLNAVVGTALIKKYPKLESEFVYGDYKVYDVRKMIAKSEQEIGKATAKYFFYSNIMNFFKTEITLANGEIRKRPLIETNGETGEIVWDKGRDFATVRKVLSMPQVNIVKKTEVQTGGFSKESILPKRNSDKLIARKKDWDPKKYGGFDSPTVAYSVLVVAKVEKGKSKKLKSVKELLGITIMERSSFEKNPIDFLEAKGYKEVKKDLIIKLPKYSLFELENGRKRMLASAGELQKGNELALPSKYVNFLYLASHYEKLKGSPGSSGSETPGTSESATPESSGSEVEFSHEYWMRHALTLAKRARDEREVPVGAVLVLNNRVIGEGWNRAHAEIMALRQGGLVMQNYRLIDATLYVTFEPCVMCAGAMIHSRIGRVVFGVRNAKTGAAGSLMDVLHYPGMNHRVEITEGILADECAALLCYFFRMPRQEDNEQKQLFVEQHKHYLDEIIEQISEFSKRVILADANLDKVLSAYNKHRDKPIREQAENIIHLFTLTNLGAPAAFKYFDTTIDRKRYTSTKEVLDATLIHQSITGLYETRIDLSQLGGD

SEQ ID NO: 172 - protein, 1549 aa, Artificial Sequence
  Description of Artificial Sequence: Synthetic polypeptide
MDKKYSIGLAIGTNSVGWAVITDEYKVPSKKFKVLGNTDRHSIKKNLIGALLFDSGETAEATRLKRTARRRYTRRKNRICYLQEIFSNEMAKVDDSFFHRLEESFLVEEDKKHERHPIFGNIVDEVAYHEKYPTIYHLRKKLVDSTDKADLRLIYLALAHMIKFRGHFLIEGDLNPDNSDVDKLFIQLVQTYNQLFEENPINASGVDAKAILSARLSKSRRLENLIAQLPGEKKNGLFGNLIALSLGLTPNFKSNFDLAEDAKLQLSKDTYDDDLDNLLAQIGDQYADLFLAAKNLSDAILLSDILRVNTEITKAPLSASMIKRYDEHHQDLTLLKALVRQQLPEKYKEIFFDQSKNGYAGYIDGGASQEEFYKFIKPILEKMDGTEELLVKLNREDLLRKQRTFDNGSIPHQIHLGELHAILRRQEDFYPFLKDNREKIEKILTFRIPYYVGPLARGNSRFAWMTRKSEETITPWNFEEVVDKGASAQSFIERMTNFDKNLPNEKVLPKHSLLYEYFTVYNELTKVKYVTEGMRKPAFLSGEQKKAIVDLLFKTNRKVTVKQLKEDYFKKIECFDSVEISGVEDRFNASLGTYHDLLKIIKDKDFLDNEENEDILEDIVLTLTLFEDREMIEERLKTYAHLFDDKVMKQLKRRRYTGWGRLSRKLINGIRDKQSGKTILDFLKSDGFANRNFMQLIHDDSLTFKEDIQKAQVSGQGDSLHEHIANLAGSPAIKKGILQTVKVVDELVKVMGRHKPENIVIEMARENQTTQKGQKNSRERMKRIEEGIKELGSQILKEHPVENTQLQNEKLYLYYLQNGRDMYVDQELDINRLSDYDVDHIVPQSFLKDDSIDNKVLTRSDKNRGKSDNVPSEEVVKKMKNYWRQLLNAKLITQRKFDNLTKAERGGLSELDKAGFIKRQLVETRQITKHVAQILDSRMNTKYDENDKLIREVKVITLKSKLVSDFRKDFQFYKVREINNYHHAHDAYLNAVVGTALSHEYWMRHALTLAKRARDEREVPVGAVLVLNNRVIGEGWNRAIGLHDPTAHAEIMALRQGGLVMQNYRLIDATLYVTFEPCVMCAGAMIHSRIGRVVFGVRNAKTGAAGSLMDVLHYPGMNHRVEITEGILADECAALLCYFFRMPRQVFNAQKKAQSSTDGSSGSETPGTSESATPESSGIKKYPKLESEFVYGDYKVYDVRKMIAKSEQEIGKATAKYFFYSNIMNFFKTEITLANGEIRKRPLIETNGETGEIVWDKGRDFATVRKVLSMPQVNIVKKTEVQTGGFSKESILPKRNSDKLIARKKDWDPKKYGGFDSPTVAYSVLVVAKVEKGKSKKLKSVKELLGITIMERSSFEKNPIDFLEAKGYKEVKKDLIIKLPKYSLFELENGRKRMLASAGELQKGNELALPSKYVNFLYLASHYEKLKGSPEDNEQKQLFVEQHKHYLDEIIEQISEFSKRVILADANLDKVLSAYNKHRDKPIREQAENIIHLFTLTNLGAPAAFKYFDTTIDRKRYTSTKEVLDATLIHQSITGLYETRIDLSQLGGD

SEQ ID NO: 173 - protein, 1555 aa, Artificial Sequence
  Description of Artificial Sequence: Synthetic polypeptide
MDKKYSIGLAIGTNSVGWAVITDEYKVPSKKFKVLGNTDRHSIKKNLIGALLFDSGETAEATRLKRTARRRYTRRKNRICYLQEIFSNEMAKVDDSFFHRLEESFLVEEDKKHERHPIFGNIVDEVAYHEKYPTIYHLRKKLVDSTDKADLRLIYLALAHMIKFRGHFLIEGDLNPDNSDVDKLFIQLVQTYNQLFEENPINASGVDAKAILSARLSKSRRLENLIAQLPGEKKNGLFGNLIALSLGLTPNFKSNFDLAEDAKLQLSKDTYDDDLDNLLAQIGDQYADLFLAAKNLSDAILLSDILRVNTEITKAPLSASMIKRYDEHHQDLTLLKALVRQQLPEKYKEIFFDQSKNGYAGYIDGGASQEEFYKFIKPILEKMDGTEELLVKLNREDLLRKQRTFDNGSIPHQIHLGELHAILRRQEDFYPFLKDNREKIEKILTFRIPYYVGPLARGNSRFAWMTRKSEETITPWNFEEVVDKGASAQSFIERMTNFDKNLPNEKVLPKHSLLYEYFTVYNELTKVKYVTEGMRKPAFLSGEQKKAIVDLLFKTNRKVTVKQLKEDYFKKIECFDSVEISGVEDRFNASLGTYHDLLKIIKDKDFLDNEENEDILEDIVLTLTLFEDREMIEERLKTYAHLFDDKVMKQLKRRRYTGWGRLSRKLINGIRDKQSGKTILDFLKSDGFANRNFMQLIHDDSLTFKEDIQKAQVSGQGDSLHEHIANLAGSPAIKKGILQTVKVVDELVKVMGRHKPENIVIEMARENQTTQKGQKNSRERMKRIEEGIKELGSQILKEHPVENTQLQNEKLYLYYLQNGRDMYVDQELDINRLSDYDVDHIVPQSFLKDDSIDNKVLTRSDKNRGKSDNVPSEEVVKKMKNYWRQLLNAKLITQRKFDNLTKAERGGLSELDKAGFIKRQLVETRQITKHVAQILDSRMNTKYDENDKLIREVKVITLKSKLVSDFRKDFQFYKVREINNYHHAHDAYLNAVVGTALSHEYWMRHALTLAKRARDEREVPVGAVLVLNNRVIGEGWNRAIGLHDPTAHAEIMALRQGGLVMQNYRLIDATLYVTFEPCVMCAGAMIHSRIGRVVFGVRNAKTGAAGSLMDVLHYPGMNHRVEITEGILADECAALLCYFFRMPRQVFNAQKKAQSSTDGSSGSSGSETPGTSESATPESSGGSSIKKYPKLESEFVYGDYKVYDVRKMIAKSEQEIGKATAKYFFYSNIMNFFKTEITLANGEIRKRPLIETNGETGEIVWDKGRDFATVRKVLSMPQVNIVKKTEVQTGGFSKESILPKRNSDKLIARKKDWDPKKYGGFDSPTVAYSVLVVAKVEKGKSKKLKSVKELLGITIMERSSFEKNPIDFLEAKGYKEVKKDLIIKLPKYSLFELENGRKRMLASAGELQKGNELALPSKYVNFLYLASHYEKLKGSPEDNEQKQLFVEQHKHYLDEIIEQISEFSKRVILADANLDKVLSAYNKHRDKPIREQAENIIHLFTLTNLGAPAAFKYFDTTIDRKRYTSTKEVLDATLIHQSITGLYETRIDLSQLGGD

SEQ ID NO: 174 - protein, 1421 aa, Artificial Sequence
  Description of Artificial Sequence: Synthetic polypeptide
MDKKYSIGLAIGTNSVGWAVITDEYKVPSKKFKVLGNTDRHSIKKNLIGALLFDSGETAEATRLKRTARRRYTRRKNRICYLQEIFSNEMAKVDDSFFHRLEESFLVEEDKKHERHPIFGNIVDEVAYHEKYPTIYHLRKKLVDSTDKADLRLIYLALAHMIKFRGHFLIEGDLNPDNSDVDKLFIQLVQTYNQLFEENPINASGVDAKAILSARLSKSRRLENLIAQLPGEKKNGLFGNLIALSLGLTPNFKSNFDLAEDAKLQLSKDTYDDDLDNLLAQIGDQYADLFLAAKNLSDAILLSDILRVNTEITKAPLSASMIKRYDEHHQDLTLLKALVRQQLPEKYKEIFFDQSKNGYAGYIDGGASQEEFYKFIKPILEKMDGTEELLVKLNREDLLRKQRTFDNGSIPHQIHLGELHAILRRQEDFYPFLKDNREKIEKILTFRIPYYVGPLARGNSRFAWMTRKSEETITPWNFEEVVDKGASAQSFIERMTNFDKNLPNEKVLPKHSLLYEYFTVYNELTKVKYVTEGMRKPAFLSGEQKKAIVDLLFKTNRKVTVKQLKEDYFKKIECFDSVEISGVEDRFNASLGTYHDLLKIIKDKDFLDNEENEDILEDIVLTLTLFEDREMIEERLKTYAHLFDDKVMKQLKRRRYTGWGRLSRKLINGIRDKQSGKTILDFLKSDGFANRNFMQLIHDDSLTFKEDIQKAQVSGQGDSLHEHIANLAGSPAIKKGILQTVKVVDELVKVMGRHKPENIVIEMARENQTTQKGQKNSRERMKRIEEGIKELGSEVEFSHEYWMRHALTLAKRARDEREVPVGAVLVLNNRVIGEGWNRAIGLHDPTAHAEIMALRQGGLVMQNYRLIDATLYVTFEPCVMCAGAMIHSRIGRVVFGVRNAKTGAAGSLMDVLHYPGMNHRVEITEGILADECAALLCYFFRMPRQVFNAQKKAQSSTDGGLSELDKAGFIKRQLVETRQITKHVAQILDSRMNTKYDENDKLIREVKVITLKSKLVSDFRKDFQFYKVREINNYHHAHDAYLNAVVGTALIKKYPKLESEFVYGDYKVYDVRKMIAKSEQEIGKATAKYFFYSNIMNFFKTEITLANGEIRKRPLIETNGETGEIVWDKGRDFATVRKVLSMPQVNIVKKTEVQTGGFSKESILPKRNSDKLIARKKDWDPKKYGGFDSPTVAYSVLVVAKVEKGKSKKLKSVKELLGITIMERSSFEKNPIDFLEAKGYKEVKKDLIIKLPKYSLFELENGRKRMLASAGELQKGNELALPSKYVNFLYLASHYEKLKGSPEDNEQKQLFVEQHKHYLDEIIEQISEFSKRVILADANLDKVLSAYNKHRDKPIREQAENIIHLFTLTNLGAPAAFKYFDTTIDRKRYTSTKEVLDATLIHQSITGLYETRIDLSQLGGD

SEQ ID NO: 175 - protein, 1552 aa, Artificial Sequence
  Description of Artificial Sequence: Synthetic polypeptide
MSEVEFSHEYWMRHALTLAKRARDEREVPVGAVLVLNNRVIGEGWNRAIGLHDPTAHAEIMALRQGGLVMQNYRLIDATLYVTFEPCVMCAGAMIHSRIGRVVFGVRNAKTGAAGSLMDVLHYPGMNHRVEITEGILADECAALLCYFFRMPRSGGSSGGSSGSETPGTSESATPESSGGSSGGSDKKYSIGLAIGTNSVGWAVITDEYKVPSKKFKVLGNTDRHSIKKNLIGALLFDSGETAEATRLKRTARRRYTRRKNRICYLQEIFSNEMAKVDDSFFHRLEESFLVEEDKKHERHPIFGNIVDEVAYHEKYPTIYHLRKKLVDSTDKADLRLIYLALAHMIKFRGHFLIEGDLNPDNSDVDKLFIQLVQTYNQLFEENPINASGVDAKAILSARLSKSRRLENLIAQLPGEKKNGLFGNLIALSLGLTPNFKSNFDLAEDAKLQLSKDTYDDDLDNLLAQIGDQYADLFLAAKNLSDAILLSDILRVNTEITKAPLSASMIKRYDEHHQDLTLLKALVRQQLPEKYKEIFFDQSKNGYAGYIDGGASQEEFYKFIKPILEKMDGTEELLVKLNREDLLRKQRTFDNGSIPHQIHLGELHAILRRQEDFYPFLKDNREKIEKILTFRIPYYVGPLARGNSRFAWMTRKSEETITPWNFEEVVDKGASAQSFIERMTNFDKNLPNEKVLPKHSLLYEYFTVYNELTKVKYVTEGMRKPAFLSGEQKKAIVDLLFKTNRKVTVKQLKEDYFKKIECFDSVEISGVEDRFNASLGTYHDLLKIIKDKDFLDNEENEDILEDIVLTLTLFEDREMIEERLKTYAHLFDDKVMKQLKRRRYTGWGRLSRKLINGIRDKQSGKTILDFLKSDGFANRNFMQLIHDDSLTFKEDIQKAQVSGQGDSLHEHIANLAGSPAIKKGILQTVKVVDELVKVMGRHKPENIVIEMARENQTTQKGQKNSRERMKRIEEGIKELGSQILKEHPVENTQLQNEKLYLYYLQNGRDMYVDQELDINRLSDYDVDHIVPQSFLKDDSIDNKVLTRSDKNRGKSDNVPSEEVVKKMKNYWRQLLNAKLITQRKFDNLTKAERGGLSELDKAGFIKRQLVETRQITKHVAQILDSRMNTKYDENDKLIREVKVITLKSKLVSDFRKDFQFYKVREINNYHHAHDAYLNAVVGTALIKKYPKLESEFVYGDYKVYDVRKMIAKSEQEIGKATAKYFFYSNIMNFFKTEITLANGEIRKRPLIETNGETGEIVWDKGRDFATVRKVLSMPQVNIVKKTEVQTGGFSKESILPKRNSDKLIARKKDWDPKKYGGFDSPTVAYSVLVVAKVEKGKSKKLKSVKELLGITIMERSSFEKNPIDFLEAKGYKEVKKDLIIKLPKYSLFELENGRKRMLASAGELQKGNELALPSKYVNFLYLASHYEKLKGSPEDNEQKQLFVEQHKHYLDEIIEQISEFSKRVILADANLDKVLSAYNKHRDKPIREQAENIIHLFTLTNLGAPAAFKYFDTTIDRKRYTSTKEVLDATLIHQSITGLYETRIDLSQLGGD

SEQ ID NO: 176 - protein, 1545 aa, Artificial Sequence
  Description of Artificial Sequence: Synthetic polypeptide
MSEVEFSHEYWMRHALTLAKRARDEREVPVGAVLVLNNRVIGEGWNRTAHAEIMALRQGGLVMQNYRLIDATLYVTFEPCVMCAGAMIHSRIGRVVFGVRNAKTGAAGSLMDVLHYPGMNHRVEITEGILADECAALLCYFFRMPRSGGSSGGSSGSETPGTSESATPESSGGSSGGSDKKYSIGLAIGTNSVGWAVITDEYKVPSKKFKVLGNTDRHSIKKNLIGALLFDSGETAEATRLKRTARRRYTRRKNRICYLQEIFSNEMAKVDDSFFHRLEESFLVEEDKKHERHPIFGNIVDEVAYHEKYPTIYHLRKKLVDSTDKADLRLIYLALAHMIKFRGHFLIEGDLNPDNSDVDKLFIQLVQTYNQLFEENPINASGVDAKAILSARLSKSRRLENLIAQLPGEKKNGLFGNLIALSLGLTPNFKSNFDLAEDAKLQLSKDTYDDDLDNLLAQIGDQYADLFLAAKNLSDAILLSDILRVNTEITKAPLSASMIKRYDEHHQDLTLLKALVRQQLPEKYKEIFFDQSKNGYAGYIDGGASQEEFYKFIKPILEKMDGTEELLVKLNREDLLRKQRTFDNGSIPHQIHLGELHAILRRQEDFYPFLKDNREKIEKILTFRIPYYVGPLARGNSRFAWMTRKSEETITPWNFEEVVDKGASAQSFIERMTNFDKNLPNEKVLPKHSLLYEYFTVYNELTKVKYVTEGMRKPAFLSGEQKKAIVDLLFKTNRKVTVKQLKEDYFKKIECFDSVEISGVEDRFNASLGTYHDLLKIIKDKDFLDNEENEDILEDIVLTLTLFEDREMIEERLKTYAHLFDDKVMKQLKRRRYTGWGRLSRKLINGIRDKQSGKTILDFLKSDGFANRNFMQLIHDDSLTFKEDIQKAQVSGQGDSLHEHIANLAGSPAIKKGILQTVKVVDELVKVMGRHKPENIVIEMARENQTTQKGQKNSRERMKRIEEGIKELGSQILKEHPVENTQLQNEKLYLYYLQNGRDMYVDQELDINRLSDYDVDHIVPQSFLKDDSIDNKVLTRSDKNRGKSDNVPSEEVVKKMKNYWRQLLNAKLITQRKFDNLTKAERGGLSELDKAGFIKRQLVETRQITKHVAQILDSRMNTKYDENDKLIREVKVITLKSKLVSDFRKDFQFYKVREINNYHHAHDAYLNAVVGTALIKKYPKLESEFVYGDYKVYDVRKMIAKSEQEIGKATAKYFFYSNIMNFFKTEITLANGEIRKRPLIETNGETGEIVWDKGRDFATVRKVLSMPQVNIVKKTEVQTGGFSKESILPKRNSDKLIARKKDWDPKKYGGFDSPTVAYSVLVVAKVEKGKSKKLKSVKELLGITIMERSSFEKNPIDFLEAKGYKEVKKDLIIKLPKYSLFELENGRKRMLASAGELQKGNELALPSKYVNFLYLASHYEKLKGSPEDNEQKQLFVEQHKHYLDEIIEQISEFSKRVILADANLDKVLSAYNKHRDKPIREQAENIIHLFTLTNLGAPAAFKYFDTTIDRKRYTSTKEVLDATLIHQSITGLYETRIDLSQLGGD

SEQ ID NO: 177 - protein, 1541 aa, Artificial Sequence
  Description of Artificial Sequence: Synthetic polypeptide
MDKKYSIGLAIGTNSVGWAVITDEYKVPSKKFKVLGNTDRHSIKKNLIGALLFDSGETAEATRLKRTARRRYTRRKNRICYLQEIFSNEMAKVDDSFFHRLEESFLVEEDKKHERHPIFGNIVDEVAYHEKYPTIYHLRKKLVDSTDKADLRLIYLALAHMIKFRGHFLIEGDLNPDNSDVDKLFIQLVQTYNQLFEENPINASGVDAKAILSARLSKSRRLENLIAQLPGEKKNGLFGNLIALSLGLTPNFKSNFDLAEDAKLQLSKDTYDDDLDNLLAQIGDQYADLFLAAKNLSDAILLSDILRVNTEITKAPLSASMIKRYDEHHQDLTLLKALVRQQLPEKYKEIFFDQSKNGYAGYIDGGASQEEFYKFIKPILEKMDGTEELLVKLNREDLLRKQRTFDNGSIPHQIHLGELHAILRRQEDFYPFLKDNREKIEKILTFRIPYYVGPLARGNSRFAWMTRKSEETITPWNFEEVVDKGASAQSFIERMTNFDKNLPNEKVLPKHSLLYEYFTVYNELTKVKYVTEGMRKPAFLSGEQKKAIVDLLFKTNRKVTVKQLKEDYFKKIECFDSVEISGVEDRFNASLGTYHDLLKIIKDKDFLDNEENEDILEDIVLTLTLFEDREMIEERLKTYAHLFDDKVMKQLKRRRYTGWGRLSRKLINGIRDKQSGKTILDFLKSDGFANRNFMQLIHDDSLTFKEDIQKAQVSGQGDSLHEHIANLAGSPAIKKGILQTVKVVDELVKVMGRHKPENIVIEMARENQTTQKGQKNSRERMKRIEEGIKELGSQILKEHPVENTQLQNEKLYLYYLQNGRDMYVDQELDINRLSDYDVDHIVPQSFLKDDSIDNKVLTRSDKNRGKSDNVPSEEVVKKMKNYWRQLLNAKLITQRKFDNLTKAERGGLSELDKAGFIKRQLVETRQITKHVAQILDSRMNTKYDENDKLIREVKVITLKSKLVSDFRKDFQFYKVREINNYHHAHDAYLNAVVGTALIKKYPKGSSGSETPGTSESATPESSGSEVEFSHEYWMRHALTLAKRARDEREVPVGAVLVLNNRVIGEGWNRAIGLHDPTAHAEIMALRQGGLVMQNYRLIDATLYVTFEPCVMCAGAMIHSRIGRVVFGVRNAKTGAAGSLMDVLHYPGMNHRVEITEGILADECAALLCYFFRMPRQLESEFVYGDYKVYDVRKMIAKSEQEIGKATAKYFFYSNIMNFFKTEITLANGEIRKRPLIETNGETGEIVWDKGRDFATVRKVLSMPQVNIVKKTEVQTGGFSKESILPKRNSDKLIARKKDWDPKKYGGFDSPTVAYSVLVVAKVEKGKSKKLKSVKELLGITIMERSSFEKNPIDFLEAKGYKEVKKDLIIKLPKYSLFELENGRKRMLASAGELQKGNELALPSKYVNFLYLASHYEKLKGSPEDNEQKQLFVEQHKHYLDEIIEQISEFSKRVILADANLDKVLSAYNKHRDKPIREQAENIIHLFTLTNLGAPAAFKYFDTTIDRKRYTSTKEVLDATLIHQSITGLYETRIDLSQLGGD

SEQ ID NO: 178 - protein, 1541 aa, Artificial Sequence
  Description of Artificial Sequence: Synthetic polypeptide
MDKKYSIGLAIGTNSVGWAVITDEYKVPSKKFKVLGNTDRHSIKKNLIGALLFDSGETAEATRLKRTARRRYTRRKNRICYLQEIFSNEMAKVDDSFFHRLEESFLVEEDKKHERHPIFGNIVDEVAYHEKYPTIYHLRKKLVDSTDKADLRLIYLALAHMIKFRGHFLIEGDLNPDNSDVDKLFIQLVQTYNQLFEENPINASGVDAKAILSARLSKSRRLENLIAQLPGEKKNGLFGNLIALSLGLTPNFKSNFDLAEDAKLQLSKDTYDDDLDNLLAQIGDQYADLFLAAKNLSDAILLSDILRVNTEITKAPLSASMIKRYDEHHQDLTLLKALVRQQLPEKYKEIFFDQSKNGYAGYIDGGASQEEFYKFIKPILEKMDGTEELLVKLNREDLLRKQRTFDNGSIPHQIHLGELHAILRRQEDFYPFLKDNREKIEKILTFRIPYYVGPLARGNSRFAWMTRKSEETITPWNFEEVVDKGASAQSFIERMTNFDKNLPNEKVLPKHSLLYEYFTVYNELTKVKYVTEGMRKPAFLSGEQKKAIVDLLFKTNRKVTVKQLKEDYFKKIECFDSVEISGVEDRFNASLGTYHDLLKIIKDKDFLDNEENEDILEDIVLTLTLFEDREMIEERLKTYAHLFDDKVMKQLKRRRYTGWGRLSRKLINGIRDKQSGKTILDFLKSDGFANRNFMQLIHDDSLTFKEDIQKAQVSGQGDSLHEHIANLAGSPAIKKGILQTVKVVDELVKVMGRHKPENIVIEMARENQTTQKGQKNSRERMKRIEEGIKELGSQILKEHPVENTQLQNEKLYLYYLQNGRDMYVDQELDINRLSDYDVDHIVPQSFLKDDSIDNKVLTRSDKNRGKSDNVPSEEVVKKMKNYWRQLLNAKLITQRKFDNLTKAERGGLSELDKAGFIKRQLVETRQITKHVAQILDSRMNTKYDENDKLIREVKVITLKSKLVSDFRKDFQFYKVREINNYHHAHDAYLNAVVGTALIKKYPKLGSSGSETPGTSESATPESSGSEVEFSHEYWMRHALTLAKRARDEREVPVGAVLVLNNRVIGEGWNRAIGLHDPTAHAEIMALRQGGLVMQNYRLIDATLYVTFEPCVMCAGAMIHSRIGRVVFGVRNAKTGAAGSLMDVLHYPGMNHRVEITEGILADECAALLCYFFRMPRQESEFVYGDYKVYDVRKMIAKSEQEIGKATAKYFFYSNIMNFFKTEITLANGEIRKRPLIETNGETGEIVWDKGRDFATVRKVLSMPQVNIVKKTEVQTGGFSKESILPKRNSDKLIARKKDWDPKKYGGFDSPTVAYSVLVVAKVEKGKSKKLKSVKELLGITIMERSSFEKNPIDFLEAKGYKEVKKDLIIKLPKYSLFELENGRKRMLASAGELQKGNELALPSKYVNFLYLASHYEKLKGSPEDNEQKQLFVEQHKHYLDEIIEQISEFSKRVILADANLDKVLSAYNKHRDKPIREQAENIIHLFTLTNLGAPAAFKYFDTTIDRKRYTSTKEVLDATLIHQSITGLYETRIDLSQLGGD

SEQ ID NO: 179 - protein, 1541 aa, Artificial Sequence
  Description of Artificial Sequence: Synthetic polypeptide
MDKKYSIGLAIGTNSVGWAVITDEYKVPSKKFKVLGNTDRHSIKKNLIGALLFDSGETAEATRLKRTARRRYTRRKNRICYLQEIFSNEMAKVDDSFFHRLEESFLVEEDKKHERHPIFGNIVDEVAYHEKYPTIYHLRKKLVDSTDKADLRLIYLALAHMIKFRGHFLIEGDLNPDNSDVDKLFIQLVQTYNQLFEENPINASGVDAKAILSARLSKSRRLENLIAQLPGEKKNGLFGNLIALSLGLTPNFKSNFDLAEDAKLQLSKDTYDDDLDNLLAQIGDQYADLFLAAKNLSDAILLSDILRVNTEITKAPLSASMIKRYDEHHQDLTLLKALVRQQLPEKYKEIFFDQSKNGYAGYIDGGASQEEFYKFIKPILEKMDGTEELLVKLNREDLLRKQRTFDNGSIPHQIHLGELHAILRRQEDFYPFLKDNREKIEKILTFRIPYYVGPLARGNSRFAWMTRKSEETITPWNFEEVVDKGASAQSFIERMTNFDKNLPNEKVLPKHSLLYEYFTVYNELTKVKYVTEGMRKPAFLSGEQKKAIVDLLFKTNRKVTVKQLKEDYFKKIECFDSVEISGVEDRFNASLGTYHDLLKIIKDKDFLDNEENEDILEDIVLTLTLFEDREMIEERLKTYAHLFDDKVMKQLKRRRYTGWGRLSRKLINGIRDKQSGKTILDFLKSDGFANRNFMQLIHDDSLTFKEDIQKAQVSGQGDSLHEHIANLAGSPAIKKGILQTVKVVDELVKVMGRHKPENIVIEMARENQTTQKGQKNSRERMKRIEEGIKELGSQILKEHPVENTQLQNEKLYLYYLQNGRDMYVDQELDINRLSDYDVDHIVPQSFLKDDSIDNKVLTRSDKNRGKSDNVPSEEVVKKMKNYWRQLLNAKLITQRKFDNLTKAERGGLSELDKAGFIKRQLVETRQITKHVAQILDSRMNTKYDENDKLIREVKVITLKSKLVSDFRKDFQFYKVREINNYHHAHDAYLNAVVGTALIKKYPKLEGSSGSETPGTSESATPESSGSEVEFSHEYWMRHALTLAKRARDEREVPVGAVLVLNNRVIGEGWNRAIGLHDPTAHAEIMALRQGGLVMQNYRLIDATLYVTFEPCVMCAGAMIHSRIGRVVFGVRNAKTGAAGSLMDVLHYPGMNHRVEITEGILADECAALLCYFFRMPRQSEFVYGDYKVYDVRKMIAKSEQEIGKATAKYFFYSNIMNFFKTEITLANGEIRKRPLIETNGETGEIVWDKGRDFATVRKVLSMPQVNIVKKTEVQTGGFSKESILPKRNSDKLIARKKDWDPKKYGGFDSPTVAYSVLVVAKVEKGKSKKLKSVKELLGITIMERSSFEKNPIDFLEAKGYKEVKKDLIIKLPKYSLFELENGRKRMLASAGELQKGNELALPSKYVNFLYLASHYEKLKGSPEDNEQKQLFVEQHKHYLDEIIEQISEFSKRVILADANLDKVLSAYNKHRDKPIREQAENIIHLFTLTNLGAPAAFKYFDTTIDRKRYTSTKEVLDATLIHQSITGLYETRIDLSQLGGD

SEQ ID NO: 180 - protein, 1541 aa, Artificial Sequence
  Description of Artificial Sequence: Synthetic polypeptide
MDKKYSIGLAIGTNSVGWAVITDEYKVPSKKFKVLGNTDRHSIKKNLIGALLFDSGETAEATRLKRTARRRYTRRKNRICYLQEIFSNEMAKVDDSFFHRLEESFLVEEDKKHERHPIFGNIVDEVAYHEKYPTIYHLRKKLVDSTDKADLRLIYLALAHMIKFRGHFLIEGDLNPDNSDVDKLFIQLVQTYNQLFEENPINASGVDAKAILSARLSKSRRLENLIAQLPGEKKNGLFGNLIALSLGLTPNFKSNFDLAEDAKLQLSKDTYDDDLDNLLAQIGDQYADLFLAAKNLSDAILLSDILRVNTEITKAPLSASMIKRYDEHHQDLTLLKALVRQQLPEKYKEIFFDQSKNGYAGYIDGGASQEEFYKFIKPILEKMDGTEELLVKLNREDLLRKQRTFDNGSIPHQIHLGELHAILRRQEDFYPFLKDNREKIEKILTFRIPYYVGPLARGNSRFAWMTRKSEETITPWNFEEVVDKGASAQSFIERMTNFDKNLPNEKVLPKHSLLYEYFTVYNELTKVKYVTEGMRKPAFLSGEQKKAIVDLLFKTNRKVTVKQLKEDYFKKIECFDSVEISGVEDRFNASLGTYHDLLKIIKDKDFLDNEENEDILEDIVLTLTLFEDREMIEERLKTYAHLFDDKVMKQLKRRRYTGWGRLSRKLINGIRDKQSGKTILDFLKSDGFANRNFMQLIHDDSLTFKEDIQKAQVSGQGDSLHEHIANLAGSPAIKKGILQTVKVVDELVKVMGRHKPENIVIEMARENQTTQKGQKNSRERMKRIEEGIKELGSQILKEHPVENTQLQNEKLYLYYLQNGRDMYVDQELDINRLSDYDVDHIVPQSFLKDDSIDNKVLTRSDKNRGKSDNVPSEEVVKKMKNYWRQLLNAKLITQRKFDNLTKAERGGLSELDKAGFIKRQLVETRQITKHVAQILDSRMNTKYDENDKLIREVKVITLKSKLVSDFRKDFQFYKVREINNYHHAHDAYLNAVVGTALIKKYPKLESGSSGSETPGTSESATPESSGSEVEFSHEYWMRHALTLAKRARDEREVPVGAVLVLNNRVIGEGWNRAIGLHDPTAHAEIMALRQGGLVMQNYRLIDATLYVTFEPCVMCAGAMIHSRIGRVVFGVRNAKTGAAGSLMDVLHYPGMNHRVEITEGILADECAALLCYFFRMPRQEFVYGDYKVYDVRKMIAKSEQEIGKATAKYFFYSNIMNFFKTEITLANGEIRKRPLIETNGETGEIVWDKGRDFATVRKVLSMPQVNIVKKTEVQTGGFSKESILPKRNSDKLIARKKDWDPKKYGGFDSPTVAYSVLVVAKVEKGKSKKLKSVKELLGITIMERSSFEKNPIDFLEAKGYKEVKKDLIIKLPKYSLFELENGRKRMLASAGELQKGNELALPSKYVNFLYLASHYEKLKGSPEDNEQKQLFVEQHKHYLDEIIEQISEFSKRVILADANLDKVLSAYNKHRDKPIREQAENIIHLFTLTNLGAPAAFKYFDTTIDRKRYTSTKEVLDATLIHQSITGLYETRIDLSQLGGD

SEQ ID NO: 181 - protein, 1541 aa, Artificial Sequence
  Description of Artificial Sequence: Synthetic polypeptide
MDKKYSIGLAIGTNSVGWAVITDEYKVPSKKFKVLGNTDRHSIKKNLIGALLFDSGETAEATRLKRTARRRYTRRKNRICYLQEIFSNEMAKVDDSFFHRLEESFLVEEDKKHERHPIFGNIVDEVAYHEKYPTIYHLRKKLVDSTDKADLRLIYLALAHMIKFRGHFLIEGDLNPDNSDVDKLFIQLVQTYNQLFEENPINASGVDAKAILSARLSKSRRLENLIAQLPGEKKNGLFGNLIALSLGLTPNFKSNFDLAEDAKLQLSKDTYDDDLDNLLAQIGDQYADLFLAAKNLSDAILLSDILRVNTEITKAPLSASMIKRYDEHHQDLTLLKALVRQQLPEKYKEIFFDQSKNGYAGYIDGGASQEEFYKFIKPILEKMDGTEELLVKLNREDLLRKQRTFDNGSIPHQIHLGELHAILRRQEDFYPFLKDNREKIEKILTFRIPYYVGPLARGNSRFAWMTRKSEETITPWNFEEVVDKGASAQSFIERMTNFDKNLPNEKVLPKHSLLYEYFTVYNELTKVKYVTEGMRKPAFLSGEQKKAIVDLLFKTNRKVTVKQLKEDYFKKIECFDSVEISGVEDRFNASLGTYHDLLKIIKDKDFLDNEENEDILEDIVLTLTLFEDREMIEERLKTYAHLFDDKVMKQLKRRRYTGWGRLSRKLINGIRDKQSGKTILDFLKSDGFANRNFMQLIHDDSLTFKEDIQKAQVSGQGDSLHEHIANLAGSPAIKKGILQTVKVVDELVKVMGRHKPENIVIEMARENQTTQKGQKNSRERMKRIEEGIKELGGSSGSETPGTSESATPESSGSEVEFSHEYWMRHALTLAKRARDEREVPVGAVLVLNNRVIGEGWNRAIGLHDPTAHAEIMALRQGGLVMQNYRLIDATLYVTFEPCVMCAGAMIHSRIGRVVFGVRNAKTGAAGSLMDVLHYPGMNHRVEITEGILADECAALLCYFFRMPRQSQILKEHPVENTQLQNEKLYLYYLQNGRDMYVDQELDINRLSDYDVDHIVPQSFLKDDSIDNKVLTRSDKNRGKSDNVPSEEVVKKMKNYWRQLLNAKLITQRKFDNLTKAERGGLSELDKAGFIKRQLVETRQITKHVAQILDSRMNTKYDENDKLIREVKVITLKSKLVSDFRKDFQFYKVREINNYHHAHDAYLNAVVGTALIKKYPKLESEFVYGDYKVYDVRKMIAKSEQEIGKATAKYFFYSNIMNFFKTEITLANGEIRKRPLIETNGETGEIVWDKGRDFATVRKVLSMPQVNIVKKTEVQTGGFSKESILPKRNSDKLIARKKDWDPKKYGGFDSPTVAYSVLVVAKVEKGKSKKLKSVKELLGITIMERSSFEKNPIDFLEAKGYKEVKKDLIIKLPKYSLFELENGRKRMLASAGELQKGNELALPSKYVNFLYLASHYEKLKGSPEDNEQKQLFVEQHKHYLDEIIEQISEFSKRVILADANLDKVLSAYNKHRDKPIREQAENIIHLFTLTNLGAPAAFKYFDTTIDRKRYTSTKEVLDATLIHQSITGLYETRIDLSQLGGD

SEQ ID NO: 182 - protein, 1541 aa, Artificial Sequence
  Description of Artificial Sequence: Synthetic polypeptide
MDKKYSIGLAIGTNSVGWAVITDEYKVPSKKFKVLGNTDRHSIKKNLIGALLFDSGETAEATRLKRTARRRYTRRKNRICYLQEIFSNEMAKVDDSFFHRLEESFLVEEDKKHERHPIFGNIVDEVAYHEKYPTIYHLRKKLVDSTDKADLRLIYLALAHMIKFRGHFLIEGDLNPDNSDVDKLFIQLVQTYNQLFEENPINASGVDAKAILSARLSKSRRLENLIAQLPGEKKNGLFGNLIALSLGLTPNFKSNFDLAEDAKLQLSKDTYDDDLDNLLAQIGDQYADLFLAAKNLSDAILLSDILRVNTEITKAPLSASMIKRYDEHHQDLTLLKALVRQQLPEKYKEIFFDQSKNGYAGYIDGGASQEEFYKFIKPILEKMDGTEELLVKLNREDLLRKQRTFDNGSIPHQIHLGELHAILRRQEDFYPFLKDNREKIEKILTFRIPYYVGPLARGNSRFAWMTRKSEETITPWNFEEVVDKGASAQSFIERMTNFDKNLPNEKVLPKHSLLYEYFTVYNELTKVKYVTEGMRKPAFLSGEQKKAIVDLLFKTNRKVTVKQLKEDYFKKIECFDSVEISGVEDRFNASLGTYHDLLKIIKDKDFLDNEENEDILEDIVLTLTLFEDREMIEERLKTYAHLFDDKVMKQLKRRRYTGWGRLSRKLINGIRDKQSGKTILDFLKSDGFANRNFMQLIHDDSLTFKEDIQKAQVSGQGDSLHEHIANLAGSPAIKKGILQTVKVVDELVKVMGRHKPENIVIEMARENQTTQKGQKNSRERMKRIEEGIKELGSSGSETPGTSESATPESSGSEVEFSHEYWMRHALTLAKRARDEREVPVGAVLVLNNRVIGEGWNRAIGLHDPTAHAEIMALRQGGLVMQNYRLIDATLYVTFEPCVMCAGAMIHSRIGRVVFGVRNAKTGAAGSLMDVLHYPGMNHRVEITEGILADECAALLCYFFRMPRQGSQILKEHPVENTQLQNEKLYLYYLQNGRDMYVDQELDINRLSDYDVDHIVPQSFLKDDSIDNKVLTRSDKNRGKSDNVPSEEVVKKMKNYWRQLLNAKLITQRKFDNLTKAERGGLSELDKAGFIKRQLVETRQITKHVAQILDSRMNTKYDENDKLIREVKVITLKSKLVSDFRKDFQFYKVREINNYHHAHDAYLNAVVGTALIKKYPKLESEFVYGDYKVYDVRKMIAKSEQEIGKATAKYFFYSNIMNFFKTEITLANGEIRKRPLIETNGETGEIVWDKGRDFATVRKVLSMPQVNIVKKTEVQTGGFSKESILPKRNSDKLIARKKDWDPKKYGGFDSPTVAYSVLVVAKVEKGKSKKLKSVKELLGITIMERSSFEKNPIDFLEAKGYKEVKKDLIIKLPKYSLFELENGRKRMLASAGELQKGNELALPSKYVNFLYLASHYEKLKGSPEDNEQKQLFVEQHKHYLDEIIEQISEFSKRVILADANLDKVLSAYNKHRDKPIREQAENIIHLFTLTNLGAPAAFKYFDTTIDRKRYTSTKEVLDATLIHQSITGLYETRIDLSQLGGD

SEQ ID NO: 183 - protein, 1541 aa, Artificial Sequence
  Description of Artificial Sequence: Synthetic polypeptide
MDKKYSIGLAIGTNSVGWAVITDEYKVPSKKFKVLGNTDRHSIKKNLIGALLFDSGETAEATRLKRTARRRYTRRKNRICYLQEIFSNEMAKVDDSFFHRLEESFLVEEDKKHERHPIFGNIVDEVAYHEKYPTIYHLRKKLVDSTDKADLRLIYLALAHMIKFRGHFLIEGDLNPDNSDVDKLFIQLVQTYNQLFEENPINASGVDAKAILSARLSKSRRLENLIAQLPGEKKNGLFGNLIALSLGLTPNFKSNFDLAEDAKLQLSKDTYDDDLDNLLAQIGDQYADLFLAAKNLSDAILLSDILRVNTEITKAPLSASMIKRYDEHHQDLTLLKALVRQQLPEKYKEIFFDQSKNGYAGYIDGGASQEEFYKFIKPILEKMDGTEELLVKLNREDLLRKQRTFDNGSIPHQIHLGELHAILRRQEDFYPFLKDNREKIEKILTFRIPYYVGPLARGNSRFAWMTRKSEETITPWNFEEVVDKGASAQSFIERMTNFDKNLPNEKVLPKHSLLYEYFTVYNELTKVKYVTEGMRKPAFLSGEQKKAIVDLLFKTNRKVTVKQLKEDYFKKIECFDSVEISGVEDRFNASLGTYHDLLKIIKDKDFLDNEENEDILEDIVLTLTLFEDREMIEERLKTYAHLFDDKVMKQLKRRRYTGWGRLSRKLINGIRDKQSGKTILDFLKSDGFANRNFMQLIHDDSLTFKEDIQKAQVSGQGDSLHEHIANLAGSPAIKKGILQTVKVVDELVKVMGRHKPENIVIEMARENQTTQKGQKNSRERMKRIEEGIKEGSSGSETPGTSESATPESSGSEVEFSHEYWMRHALTLAKRARDEREVPVGAVLVLNNRVIGEGWNRAIGLHDPTAHAEIMALRQGGLVMQNYRLIDATLYVTFEPCVMCAGAMIHSRIGRVVFGVRNAKTGAAGSLMDVLHYPGMNHRVEITEGILADECAALLCYFFRMPRQLGSQILKEHPVENTQLQNEKLYLYYLQNGRDMYVDQELDINRLSDYDVDHIVPQSFLKDDSIDNKVLTRSDKNRGKSDNVPSEEVVKKMKNYWRQLLNAKLITQRKFDNLTKAERGGLSELDKAGFIKRQLVETRQITKHVAQILDSRMNTKYDENDKLIREVKVITLKSKLVSDFRKDFQFYKVREINNYHHAHDAYLNAVVGTALIKKYPKLESEFVYGDYKVYDVRKMIAKSEQEIGKATAKYFFYSNIMNFFKTEITLANGEIRKRPLIETNGETGEIVWDKGRDFATVRKVLSMPQVNIVKKTEVQTGGFSKESILPKRNSDKLIARKKDWDPKKYGGFDSPTVAYSVLVVAKVEKGKSKKLKSVKELLGITIMERSSFEKNPIDFLEAKGYKEVKKDLIIKLPKYSLFELENGRKRMLASAGELQKGNELALPSKYVNFLYLASHYEKLKGSPEDNEQKQLFVEQHKHYLDEIIEQISEFSKRVILADANLDKVLSAYNKHRDKPIREQAENIIHLFTLTNLGAPAAFKYFDTTIDRKRYTSTKEVLDATLIHQSITGLYETRIDLSQLGGD

SEQ ID NO: 184 - protein, 1484 aa, Artificial Sequence
  Description of Artificial Sequence: Synthetic polypeptide
MDKKYSIGLAIGTNSVGWAVITDEYKVPSKKFKVLGNTDRHSIKKNLIGALLFDSGETAEATRLKRTARRRYTRRKNRICYLQEIFSNEMAKVDDSFFHRLEESFLVEEDKKHERHPIFGNIVDEVAYHEKYPTIYHLRKKLVDSTDKADLRLIYLALAHMIKFRGHFLIEGDLNPDNSDVDKLFIQLVQTYNQLFEENPINASGVDAKAILSARLSKSRRLENLIAQLPGEKKNGLFGNLIALSLGLTPNFKSNFDLAEDAKLQLSKDTYDDDLDNLLAQIGDQYADLFLAAKNLSDAILLSDILRVNTEITKAPLSASMIKRYDEHHQDLTLLKALVRQQLPEKYKEIFFDQSKNGYAGYIDGGASQEEFYKFIKPILEKMDGTEELLVKLNREDLLRKQRTFDNGSIPHQIHLGELHAILRRQEDFYPFLKDNREKIEKILTFRIPYYVGPLARGNSRFAWMTRKSEETITPWNFEEVVDKGASAQSFIERMTNFDKNLPNEKVLPKHSLLYEYFTVYNELTKVKYVTEGMRKPAFLSGEQKKAIVDLLFKTNRKVTVKQLKEDYFKKIECFDSVEISGVEDRFNASLGTYHDLLKIIKDKDFLDNEENEDILEDIVLTLTLFEDREMIEERLKTYAHLFDDKVMKQLKRRRYTGWGRLSRKLINGIRDKQSGKTILDFLKSDGFANRNFMQLIHDDSLTFKEDIQKAQVSGQGDSLHEHIANLAGSPAIKKGILQTVKVVDELVKVMGRHKPENIVIEMARENQTTQKGQKNSRERMKRIEEGIKELGSQILKEHPVENTQLQNEKLYLYYLQNGRDMYVDQELDINRLSDYDVDHIVPQSFLKDDSIDNKVLTRSDKNRGKSDNVPSEEVVKKMKNYWRQLLNAKLITQRKFDNLTKAERGGLSELDKAGFIKRQLVETRQITKHVAQILDSRMNTKYDENDKLIREVKVITLKSKLVSDFRKDFQFYKVREINNYHHAHDAYLNAVVGTALIKKYPKLESEFVYGDYKVYSSGSEVEFSHEYWMRHALTLAKRARDEREVPVGAVLVLNNRVIGEGWNRAIGLHDPTAHAEIMALRQGGLVMQNYRLIDATLYVTFEPCVMCAGAMIHSRIGRVVFGVRNAKTGAAGSLMDVLHYPGMNHRVEITEGILADECAALLCYFFRMPRQVFNAQKKAQSSTDGEIVWDKGRDFATVRKVLSMPQVNIVKKTEVQTGGFSKESILPKRNSDKLIARKKDWDPKKYGGFDSPTVAYSVLVVAKVEKGKSKKLKSVKELLGITIMERSSFEKNPIDFLEAKGYKEVKKDLIIKLPKYSLFELENGRKRMLASAGELQKGNELALPSKYVNFLYLASHYEKLKGSPEDNEQKQLFVEQHKHYLDEIIEQISEFSKRVILADANLDKVLSAYNKHRDKPIREQAENIIHLFTLTNLGAPAAFKYFDTTIDRKRYTSTKEVLDATLIHQSITGLYETRIDLSQLGGD

SEQ ID NO: 185 - protein, 1554 aa, Artificial Sequence
  Description of Artificial Sequence: Synthetic polypeptide
MDKKYSIGLAIGTNSVGWAVITDEYKVPSKKFKVLGNTDRHSIKKNLIGALLFDSGETAEATRLKRTARRRYTRRKNRICYLQEIFSNEMAKVDDSFFHRLEESFLVEEDKKHERHPIFGNIVDEVAYHEKYPTIYHLRKKLVDSTDKADLRLIYLALAHMIKFRGHFLIEGDLNPDNSDVDKLFIQLVQTYNQLFEENPINASGVDAKAILSARLSKSRRLENLIAQLPGEKKNGLFGNLIALSLGLTPNFKSNFDLAEDAKLQLSKDTYDDDLDNLLAQIGDQYADLFLAAKNLSDAILLSDILRVNTEITKAPLSASMIKRYDEHHQDLTLLKALVRQQLPEKYKEIFFDQSKNGYAGYIDGGASQEEFYKFIKPILEKMDGTEELLVKLNREDLLRKQRTFDNGSIPHQIHLGELHAILRRQEDFYPFLKDNREKIEKILTFRIPYYVGPLARGNSRFAWMTRKSEETITPWNFEEVVDKGASAQSFIERMTNFDKNLPNEKVLPKHSLLYEYFTVYNELTKVKYVTEGMRKPAFLSGEQKKAIVDLLFKTNRKVTVKQLKEDYFKKIECFDSVEISGVEDRFNASLGTYHDLLKIIKDKDFLDNEENEDILEDIVLTLTLFEDREMIEERLKTYAHLFDDKVMKQLKRRRYTGWGRLSRKLINGIRDKQSGKTILDFLKSDGFANRNFMQLIHDDSLTFKEDIQKAQVSGQGDSLHEHIANLAGSPAIKKGILQTVKVVDELVKVMGRHKPENIVIEMARENQTTQKGQKNSRERMKRIEEGIKELGSQILKEHPVENTQLQNEKLYLYYLQNGRDMYVDQELDINRLSDYDVDHIVPQSFLKDDSIDNKVLTRSDKNRGKSDNVPSEEVVKKMKNYWRQLLNAKLITQRKFDNLTKAERGGLSELDKAGFIKRQLVETRQITKHVAQILDSRMNTKYDENDKLIREVKVITLKSKLVSDFRKDFQFYKVREINNYHHAHDAYLNAVVGTALIKKYPKLESEFVYGDYKVYDVRKMIAKSEQEIGKATAKYFFYSNIMNFFKTEITLANGEIRKRPLIETNMNHRVEITEGILADECAALLCYFFRMPRQVFNAQKKAQSSTDGSSGSETPGTSESATPESSGSEVEFSHEYWMRHALTLAKRARDEREVPVGAVLVLNNRVIGEGWNRAIGLHDPTAHAEIMALRQGGLVMQNYRLIDATLYVTFEPCVMCAGAMIHSRIGRVVFGVRNAKTGAAGSLMDVLHYPGGETGEIVWDKGRDFATVRKVLSMPQVNIVKKTEVQTGGFSKESILPKRNSDKLIARKKDWDPKKYGGFDSPTVAYSVLVVAKVEKGKSKKLKSVKELLGITIMERSSFEKNPIDFLEAKGYKEVKKDLIIKLPKYSLFELENGRKRMLASAGELQKGNELALPSKYVNFLYLASHYEKLKGSPEDNEQKQLFVEQHKHYLDEIIEQISEFSKRVILADANLDKVLSAYNKHRDKPIREQAENIIHLFTLTNLGAPAAFKYFDTTIDRKRYTSTKEVLDATLIHQSITGLYETRIDLSQLGGD

SEQ ID NO: 186 - protein, 1554 aa, Artificial Sequence
  Description of Artificial Sequence: Synthetic polypeptide
MDKKYSIGLAIGTNSVGWAVITDEYKVPSKKFKVLGNTDRHSIKKNLIGALLFDSGETAEATRLKRTARRRYTRRKNRICYLQEIFSNEMAKVDDSFFHRLEESFLVEEDKKHERHPIFGNIVDEVAYHEKYPTIYHLRKKLVDSTDKADLRLIYLALAHMIKFRGHFLIEGDLNPDNSDVDKLFIQLVQTYNQLFEENPINASGVDAKAILSARLSKSRRLENLIAQLPGEKKNGLFGNLIALSLGLTPNFKSNFDLAEDAKLQLSKDTYDDDLDNLLAQIGDQYADLFLAAKNLSDAILLSDILRVNTEITKAPLSASMIKRYDEHHQDLTLLKALVRQQLPEKYKEIFFDQSKNGYAGYIDGGASQEEFYKFIKPILEKMDGTEELLVKLNREDLLRKQRTFDNGSIPHQIHLGELHAILRRQEDFYPFLKDNREKIEKILTFRIPYYVGPLARGNSRFAWMTRKSEETITPWNFEEVVDKGASAQSFIERMTNFDKNLPNEKVLPKHSLLYEYFTVYNELTKVKYVTEGMRKPAFLSGEQKKAIVDLLFKTNRKVTVKQLKEDYFKKIECFDSVEISGVEDRFNASLGTYHDLLKIIKDKDFLDNEENEDILEDIVLTLTLFEDREMIEERLKTYAHLFDDKVMKQLKRRRYTGWGRLSRKLINGIRDKQSGKTILDFLKSDGFANRNFMQLIHDDSGSSGSETPGTSESATPESSGSEVEFSHEYWMRHALTLAKRARDEREVPVGAVLVLNNRVIGEGWNRAIGLHDPTAHAEIMALRQGGLVMQNYRLIDATLYVTFEPCVMCAGAMIHSRIGRVVFGVRNAKTGAAGSLMDVLHYPGMNHRVEITEGILADECAALLCYFFRMPRQVFNAQKKAQSSTDLTFKEDIQKAQVSGQGDSLHEHIANLAGSPAIKKGILQTVKVVDELVKVMGRHKPENIVIEMARENQTTQKGQKNSRERMKRIEEGIKELGSQILKEHPVENTQLQNEKLYLYYLQNGRDMYVDQELDINRLSDYDVDHIVPQSFLKDDSIDNKVLTRSDKNRGKSDNVPSEEVVKKMKNYWRQLLNAKLITQRKFDNLTKAERGGLSELDKAGFIKRQLVETRQITKHVAQILDSRMNTKYDENDKLIREVKVITLKSKLVSDFRKDFQFYKVREINNYHHAHDAYLNAVVGTALIKKYPKLESEFVYGDYKVYDVRKMIAKSEQEIGKATAKYFFYSNIMNFFKTEITLANGEIRKRPLIETNGETGEIVWDKGRDFATVRKVLSMPQVNIVKKTEVQTGGFSKESILPKRNSDKLIARKKDWDPKKYGGFDSPTVAYSVLVVAKVEKGKSKKLKSVKELLGITIMERSSFEKNPIDFLEAKGYKEVKKDLIIKLPKYSLFELENGRKRMLASAGELQKGNELALPSKYVNFLYLASHYEKLKGSPEDNEQKQLFVEQHKHYLDEIIEQISEFSKRVILADANLDKVLSAYNKHRDKPIREQAENIIHLFTLTNLGAPAAFKYFDTTIDRKRYTSTKEVLDATLIHQSITGLYETRIDLSQLGGD

SEQ ID NO: 187 - protein, 1554 aa, Artificial Sequence
  Description of Artificial Sequence: Synthetic polypeptide
MDKKYSIGLAIGTNSVGWAVITDEYKVPSKKFKVLGNTDRHSIKKNLIGALLFDSGETAEATRLKRTARRRYTRRKNRICYLQEIFSNEMAKVDDSFFHRLEESFLVEEDKKHERHPIFGNIVDEVAYHEKYPTIYHLRKKLVDSTDKADLRLIYLALAHMIKFRGHFLIEGDLNPDNSDVDKLFIQLVQTYNQLFEENPINASGVDAKAILSARLSKSRRLENLIAQLPGEKKNGLFGNLIALSLGLTPNFKSNFDLAEDAKLQLSKDTYDDDLDNLLAQIGDQYADLFLAAKNLSDAILLSDILRVNTEITKAPLSASMIKRYDEHHQDLTLLKALVRQQLPEKYKEIFFDQSKNGYAGYIDGGASQEEFYKFIKPILEKMDGTEELLVKLNREDLLRKQRTFDNGSIPHQIHLGELHAILRRQEDFYPFLKDNREKIEKILTFRIPYYVGPLARGNSRFAWMTRKSEETITPWNFEEVVDKGASAQSFIERMTNFDKNLPNEKVLPKHSLLYEYFTVYNELTKVKYVTEGMRKPAFLSGEQKKAIVDLLFKTNRKVTVKQLKEDYFKKIECFDSVEISGVEDRFNASLGTYHDLLKIIKDKDFLDNEENEDILEDIVLTLTLFEDREMIEERLKTYAHLFDDKVMKQLKRRRYTGWGRLSRKLINGIRDKQSGKTILDFLKSDGFANRNFMQLIHDDSLTFKEDIQKAQVSGQGDSLHEHIANLAGSPAIKKGILQTVKVVDELVKVMGRHKPENIVIEMARENQTTQKGQKNSRERMKRIEEGIKELGSQILKEHPVENTQLQNEKLYLYYLQNGRDMYVDQELDINRLSDYDVDHIVPQSFLKDDSIDNKVLTRSDKNRGKSDNVPSEEVVKKMKNYWRQLLNAKLITQRKFDNLTKAERGGLSELDKAGFIKRQLVETRQITKHVAQILDSRMNTKYDENDKLIREVKVITLKSKLVSDFRKDFQFYKVREINNYHHAHDAYLNAVVGTALIKKYPKLESEFVYGDYKVYDVRKMIAKSEQEIGKATAKYFFYSNIMNFFKTEITLANGEIRKRPLIETNGETGEIVWDKGRDFATVRKVLSMPQVNIVKKTEVQTGGFSKESILPKRNSDKLIARKKDWDPKKYGGFDSPTVAYSVLVVAKVEKGKSKKLKSVKELLGITIMERSSFEKNPIDFLEAKGYKEVKKDLIIKLPKYSLFELENGRKRMLASAGELQKGNELALPSKYVNFLYLASHYEKLKGSMNHRVEITEGILADECAALLCYFFRMPRQVFNAQKKAQSSTDGSSGSETPGTSESATPESSGSEVEFSHEYWMRHALTLAKRARDEREVPVGAVLVLNNRVIGEGWNRAIGLHDPTAHAEIMALRQGGLVMQNYRLIDATLYVTFEPCVMCAGAMIHSRIGRVVFGVRNAKTGAAGSLMDVLHYPGPEDNEQKQLFVEQHKHYLDEIIEQISEFSKRVILADANLDKVLSAYNKHRDKPIREQAENIIHLFTLTNLGAPAAFKYFDTTIDRKRYTSTKEVLDATLIHQSITGLYETRIDLSQLGGD

SEQ ID NO: 188 - protein, 1554 aa, Artificial Sequence
  Description of Artificial Sequence: Synthetic polypeptide
MDKKYSIGLAIGTNSVGWAVITDEYKVPSKKFKVLGNTDRHSIKKNLIGALLFDSGETAEATRLKRTARRRYTRRKNRICYLQEIFSNEMAKVDDSFFHRLEESFLVEEDKKHERHPIFGNIVDEVAYHEKYPTIYHLRKKLVDSTDKADLRLIYLALAHMIKFRGHFLIEGDLNPDNSDVDKLFIQLVQTYNQLFEENPINASGVDAKAILSARLSKSRRLENLIAQLPGEKKNGLFGNLIALSLGLTPNFKSNFDLAEDAKLQLSKDTYDDDLDNLLAQIGDQYADLFLAAKNLSDAILLSDILRVNTEITKAPLSASMIKRYDEHHQDLTLLKALVRQQLPEKYKEIFFDQSKNGYAGYIDGGASQEEFYKFIKPILEKMDGTEELLVKLNREDLLRKQRTFDNGSIPHQIHLGELHAILRRQEDFYPFLKDNREKIEKILTFRIPYYVGPLARGNSRFAWMTRKSEETITPWNFEEVVDKGASAQSFIERMTNFDKNLPNEKVLPKHSLLYEYFTVYNELTKVKYVTEGMRKPAFLSGEQKKAIVDLLFKTNRKVTVKQLKEDYFKKIECFDSVEISGVEDRFNASLGTYHDLLKIIKDKDFLDNEENEDILEDIVLTLTLFEDREMIEERLKTYAHLFDDKVMKQLKRRRYTGWGRLSRKLINGIRDKQSGKTILDFLKSDGFANRNFMQLIHDDSLTFKEDIQKAQVSGQGDSLHEHIANLAGSPAIKKGILQTVKVVDELVKVMGRHKPENIVIEMARENQTTQKGQKNSRERMKRIEEGIKELGSQILKEHPVENTQLQNEKLYLYYLQNGRDMYVDQELDINRLSDYDVDHIVPQSFLKDDSIDNKVLTRSDKNRGKSDNVPSEEVVKKMKNYWRQLLNAKLITQRKFDNLTKAERGGLSELDKAGFIKRQLVETRQITKHVAQILDSRMNTKYDENDKLIREVKVITLKSKLVSDFRKDFQFYKVREINNYHHAHDAYLNAVVGTALIKKYPKLESEFVYGDYKVYDVRKMIAKSEQEIGKATAKYFFYSNIMNFFKTEITLAMNHRVEITEGILADECAALLCYFFRMPRQVFNAQKKAQSSTDGSSGSETPGTSESATPESSGSEVEFSHEYWMRHALTLAKRARDEREVPVGAVLVLNNRVIGEGWNRAIGLHDPTAHAEIMALRQGGLVMQNYRLIDATLYVTFEPCVMCAGAMIHSRIGRVVFGVRNAKTGAAGSLMDVLHYPGNGEIRKRPLIETNGETGEIVWDKGRDFATVRKVLSMPQVNIVKKTEVQTGGFSKESILPKRNSDKLIARKKDWDPKKYGGFDSPTVAYSVLVVAKVEKGKSKKLKSVKELLGITIMERSSFEKNPIDFLEAKGYKEVKKDLIIKLPKYSLFELENGRKRMLASAGELQKGNELALPSKYVNFLYLASHYEKLKGSPEDNEQKQLFVEQHKHYLDEIIEQISEFSKRVILADANLDKVLSAYNKHRDKPIREQAENIIHLFTLTNLGAPAAFKYFDTTIDRKRYTSTKEVLDATLIHQSITGLYETRIDLSQLGGD

SEQ ID NO: 189 - protein, 1554 aa, Artificial Sequence
  Description of Artificial Sequence: Synthetic polypeptide
MDKKYSIGLAIGTNSVGWAVITDEYKVPSKKFKVLGNTDRHSIKKNLIGALLFDSGETAEATRLKRTARRRYTRRKNRICYLQEIFSNEMAKVDDSFFHRLEESFLVEEDKKHERHPIFGNIVDEVAYHEKYPTIYHLRKKLVDSTDKADLRLIYLALAHMIKFRGHFLIEGDLNPDNSDVDKLFIQLVQTYNQLFEENPINASGVDAKAILSARLSKSRRLENLIAQLPGEKKNGLFGNLIALSLGLTPNFKSNFDLAEDAKLQLSKDTYDDDLDNLLAQIGDQYADLFLAAKNLSDAILLSDILRVNTEITKAPLSASMIKRYDEHHQDLTLLKALVRQQLPEKYKEIFFDQSKNGYAGYIDGGASQEEFYKFIKPILEKMDGTEELLVKLNREDLLRKQRTFDNGSIPHQIHLGELHAILRRQEDFYPFLKDNREKIEKILTFRIPYYVGPLARGNSRFAWMTRKSEETITPWNFEEVVDKGASAQSFIERMTNFDKNLPNEKVLPKHSLLYEYFTVYNELTKVKYVTEGMRKPAFLSGEQKKAIVDLLFKTNRKVTVKQLKEDYFKKIECFDSVEISGVEDRFNASLGTYHDLLKIIKDKDFLDNEENEDILEDIVLTLTLFEDREMIEERLKTYAHLFDDKVMKQLKRRRYTGWGRLSRKLINGIRDKQSGKTILDFLKSDGFANRNFMQLIHDDSLTFKEDIQKAQVSGQGDSLHEHIANLAGSPAIKKGILQTVKVVDELVKVMGRHKPENIVIEMARENQTTQKGQKNSRERMKRIEEGIKELGSQILKEHPVENTQLQNEKLYLYYLQNGRDMYVDQELDINRLSDYDVDHIVPQSFLKDDSIDNKVLTRSDKNRGKSDNVPSEEVVKKMKNYWRQLLNAKLITQRKFDNLTKAERGGLSELDKAGFIKRQLVETRQITKHVAQILDSRMNTKYDENDKLIREVKVITLKSKLVSDFRKDFQFYKVREINNYHHAHDAYLNAVVGTALIKKYPKLESEFVYGDYKVYDVRKMIAKSEQEIGKATAKYFFYSMNHRVEITEGILADECAALLCYFFRMPRQVFNAQKKAQSSTDGSSGSETPGTSESATPESSGSEVEFSHEYWMRHALTLAKRARDEREVPVGAVLVLNNRVIGEGWNRAIGLHDPTAHAEIMALRQGGLVMQNYRLIDATLYVTFEPCVMCAGAMIHSRIGRVVFGVRNAKTGAAGSLMDVLHYPGNIMNFFKTEITLANGEIRKRPLIETNGETGEIVWDKGRDFATVRKVLSMPQVNIVKKTEVQTGGFSKESILPKRNSDKLIARKKDWDPKKYGGFDSPTVAYSVLVVAKVEKGKSKKLKSVKELLGITIMERSSFEKNPIDFLEAKGYKEVKKDLIIKLPKYSLFELENGRKRMLASAGELQKGNELALPSKYVNFLYLASHYEKLKGSPEDNEQKQLFVEQHKHYLDEIIEQISEFSKRVILADANLDKVLSAYNKHRDKPIREQAENIIHLFTLTNLGAPAAFKYFDTTIDRKRYTSTKEVLDATLIHQSITGLYETRIDLSQLGGD

SEQ ID NO: 190 - protein, 1554 aa, Artificial Sequence
  Description of Artificial Sequence: Synthetic polypeptide
MDKKYSIGLAIGTNSVGWAVITDEYKVPSKKFKVLGNTDRHSIKKNLIGALLFDSGETAEATRLKRTARRRYTRRKNRICYLQEIFSNEMAKVDDSFFHRLEESFLVEEDKKHERHPIFGNIVDEVAYHEKYPTIYHLRKKLVDSTDKADLRLIYLALAHMIKFRGHFLIEGDLNPDNSDVDKLFIQLVQTYNQLFEENPINASGVDAKAILSARLSKSRRLENLIAQLPGEKKNGLFGNLIALSLGLTPNFKSNFDLAEDAKLQLSKDTYDDDLDNLLAQIGDQYADLFLAAKNLSDAILLSDILRVNTEITKAPLSASMIKRYDEHHQDLTLLKALVRQQLPEKYKEIFFDQSKNGYAGYIDGGASQEEFYKFIKPILEKMDGTEELLVKLNREDLLRKQRTFDNGSIPHQIHLGELHAILRRQEDFYPFLKDNREKIEKILTFRIPYYVGPLARGNSRFAWMTRKSEETITPWNFEEVVDKGASAQSFIERMTNFDKNLPNEKVLPKHSLLYEYFTVYNELTKVKYVTEGMRKPAFLSGEQKKAIVDLLFKTNRKVTVKQLKEDYFKKIECFDSVEISGVEDRFNASLGTYHDLLKIIKDKDFLDNEENEDILEDIVLTLTLFEDREMIEERLKTYAHLFDDKVMKQLKRRRYTGWGRLSRKLINGIRDKQSGKTILDFLKSDGFANRNFMQLIHDDSLTFKEDIQKAQVSGQGDSLHEHIANLAGSPAIKKGILQTVKVVDELVKVMGRHKPENIVIEMARENQTTQKGQKNSRERMKRIEEGIKELGSQILKEHPVENTQLQNEKLYLYYLQNGRDMYVDQELDINRLSDYDVDHIVPQSFLKDDSIDNKVLTRSDKNRGKSDNVPSEEVVKKMKNYWRQLLNAKLITQRKFDNLTKAERGGLSELDKAGFIKRQLVETRQITKHVAQILDSRMNTKYDENDKLIREVKVITLKSKLVSDFRKDFQFYKVREINNYHHAHDAYLNAVVGTALIKKYPKLESEFVYGDYKVYDVRKMIAKSEQEIGKATAKYFFYSNIMNFFKTEITLANGEIRKRPLIETNGETGEIVWDKGRDFATVRKVLSMPQVNIVKKTEVQTGGFSKESILPKRNSDKLIARKKDWDPKKYGGFDSPTVAYSVLVVAKVEKGKSKKLKSVKELLGITIMERSSFEKNPIDFLEAKGYKEVKKDLIIKLPKYSLFELENGRKRMLASAGELQKGNELALPSKYVNFLYLASHYEKLKGSPEDNEQKQLFVEQHKHYLDEIIEQISEFSKRVILADANLDKVLSAYNKHRMNHRVEITEGILADECAALLCYFFRMPRQVFNAQKKAQSSTDGSSGSETPGTSESATPESSGSEVEFSHEYWMRHALTLAKRARDEREVPVGAVLVLNNRVIGEGWNRAIGLHDPTAHAEIMALRQGGLVMQNYRLIDATLYVTFEPCVMCAGAMIHSRIGRVVFGVRNAKTGAAGSLMDVLHYPGDKPIREQAENIIHLFTLTNLGAPAAFKYFDTTIDRKRYTSTKEVLDATLIHQSITGLYETRIDLSQLGGD

SEQ ID NO: 191 - protein, 1454 aa, Artificial Sequence
  Description of Artificial Sequence: Synthetic polypeptide
MDKKYSIGLAIGTNSVGWAVITDEYKVPSKKFKVLGNTDRHSIKKNLIGALLFDSGETAEATRLKRTARRRYTRRKNRICYLQEIFSNEMAKVDDSFFHRLEESFLVEEDKKHERHPIFGNIVDEVAYHEKYPTIYHLRKKLVDSTDKADLRLIYLALAHMIKFRGHFLIEGDLNPDNSDVDKLFIQLVQTYNQLFEENPINASGVDAKAILSARLSKSRRLENLIAQLPGEKKNGLFGNLIALSLGLTPNFKSNFDLAEDAKLQLSKDTYDDDLDNLLAQIGDQYADLFLAAKNLSDAILLSDILRVNTEITKAPLSASMIKRYDEHHQDLTLLKALVRQQLPEKYKEIFFDQSKNGYAGYIDGGASQEEFYKFIKPILEKMDGTEELLVKLNREDLLRKQRTFDNGSIPHQIHLGELHAILRRQEDFYPFLKDNREKIEKILTFRIPYYVGPLARGNSRFAWMTRKSEETITPWNFEEVVDKGASAQSFIERMTNFDKNLPNEKVLPKHSLLYEYFTVYNELTKVKYVTEGMRKPAFLSGEQKKAIVDLLFKTNRKVTVKQLKEDYFKKIECFDSVEISGVEDRFNASLGTYHDLLKIIKDKDFLDNEENEDILEDIVLTLTLFEDREMIEERLKTYAHLFDDKVMKQLKRRRYTGWGRLSRKLINGIRDKQSGKTILDFLKSDGFANRNFMQLIHDDSLTFKEDIQKAQVSGQGDSLHEHIANLAGSPAIKKGILQTVKVVDELVKVMGRHKPENIVIEMARENQTTQKGQKNSRERMKRIEEGIKELGSEVEFSHEYWMRHALTLAKRARDEREVPVGAVLVLNNRVIGEGWNRAIGLHDPTAHAEIMALRQGGLVMQNYRLIDATLYVTFEPCVMCAGAMIHSRIGRVVFGVRNAKTGAAGSLMDVLHYPGMNHRVEITEGILADECAALLCYFFRMPRQVFNAQKKAQSSTDEEVVKKMKNYWRQLLNAKLITQRKFDNLTKAERGGLSELDKAGFIKRQLVETRQITKHVAQILDSRMNTKYDENDKLIREVKVITLKSKLVSDFRKDFQFYKVREINNYHHAHDAYLNAVVGTALIKKYPKLESEFVYGDYKVYDVRKMIAKSEQEIGKATAKYFFYSNIMNFFKTEITLANGEIRKRPLIETNGETGEIVWDKGRDFATVRKVLSMPQVNIVKKTEVQTGGFSKESILPKRNSDKLIARKKDWDPKKYGGFDSPTVAYSVLVVAKVEKGKSKKLKSVKELLGITIMERSSFEKNPIDFLEAKGYKEVKKDLIIKLPKYSLFELENGRKRMLASAGELQKGNELALPSKYVNFLYLASHYEKLKGSPEDNEQKQLFVEQHKHYLDEIIEQISEFSKRVILADANLDKVLSAYNKHRDKPIREQAENIIHLFTLTNLGAPAAFKYFDTTIDRKRYTSTKEVLDATLIHQSITGLYETRIDLSQLGGD

SEQ ID NO: 192 - protein, 1420 aa, Artificial Sequence
  Description of Artificial Sequence: Synthetic polypeptide
MDKKYSIGLAIGTNSVGWAVITDEYKVPSKKFKVLGNTDRHSIKKNLIGALLFDSGETAEATRLKRTARRRYTRRKNRICYLQEIFSNEMAKVDDSFFHRLEESFLVEEDKKHERHPIFGNIVDEVAYHEKYPTIYHLRKKLVDSTDKADLRLIYLALAHMIKFRGHFLIEGDLNPDNSDVDKLFIQLVQTYNQLFEENPINASGVDAKAILSARLSKSRRLENLIAQLPGEKKNGLFGNLIALSLGLTPNFKSNFDLAEDAKLQLSKDTYDDDLDNLLAQIGDQYADLFLAAKNLSDAILLSDILRVNTEITKAPLSASMIKRYDEHHQDLTLLKALVRQQLPEKYKEIFFDQSKNGYAGYIDGGASQEEFYKFIKPILEKMDGTEELLVKLNREDLLRKQRTFDNGSIPHQIHLGELHAILRRQEDFYPFLKDNREKIEKILTFRIPYYVGPLARGNSRFAWMTRKSEETITPWNFEEVVDKGASAQSFIERMTNFDKNLPNEKVLPKHSLLYEYFTVYNELTKVKYVTEGMRKPAFLSGEQKKAIVDLLFKTNRKVTVKQLKEDYFKKIECFDSVEISGVEDRFNASLGTYHDLLKIIKDKDFLDNEENEDILEDIVLTLTLFEDREMIEERLKTYAHLFDDKVMKQLKRRRYTGWGRLSRKLINGIRDKQSGKTILDFLKSDGFANRNFMQLIHDDSLTFKEDIQKAQVSGQGDSLHEHIANLAGSPAIKKGILQTVKVVDELVKVMGRHKPENIVIEMARENQTTQKGQKNSRERMKRIEEGIKELGSEVEFSHEYWMRHALTLAKRARDEREVPVGAVLVLNNRVIGEGWNRAIGLHDPTAHAEIMALRQGGLVMQNYRLIDATLYVTFEPCVMCAGAMIHSRIGRVVFGVRNAKTGAAGSLMDVLHYPGMNHRVEITEGILADECAALLCYFFRMPRQVFNAQKKAQSSTDGLSELDKAGFIKRQLVETRQITKHVAQILDSRMNTKYDENDKLIREVKVITLKSKLVSDFRKDFQFYKVREINNYHHAHDAYLNAVVGTALIKKYPKLESEFVYGDYKVYDVRKMIAKSEQEIGKATAKYFFYSNIMNFFKTEITLANGEIRKRPLIETNGETGEIVWDKGRDFATVRKVLSMPQVNIVKKTEVQTGGFSKESILPKRNSDKLIARKKDWDPKKYGGFDSPTVAYSVLVVAKVEKGKSKKLKSVKELLGITIMERSSFEKNPIDFLEAKGYKEVKKDLIIKLPKYSLFELENGRKRMLASAGELQKGNELALPSKYVNFLYLASHYEKLKGSPEDNEQKQLFVEQHKHYLDEIIEQISEFSKRVILADANLDKVLSAYNKHRDKPIREQAENIIHLFTLTNLGAPAAFKYFDTTIDRKRYTSTKEVLDATLIHQSITGLYETRIDLSQLGGD

SEQ ID NO: 193 - protein, 1554 aa, Artificial Sequence
  Description of Artificial Sequence: Synthetic polypeptide
MDKKYSIGLAIGTNSVGWAVITDEYKVPSKKFKVLGNTDRHSIKKNLIGALLFDSGETAEATRLKRTARRRYTRRKNRICYLQEIFSNEMAKVDDSFFHRLEESFLVEEDKKHERHPIFGNIVDEVAYHEKYPTIYHLRKKLVDSTDKADLRLIYLALAHMIKFRGHFLIEGDLNPDNSDVDKLFIQLVQTYNQLFEENPINASGVDAKAILSARLSKSRRLENLIAQLPGEKKNGLFGNLIALSLGLTPNFKSNFDLAEDAKLQLSKDTYDDDLDNLLAQIGDQYADLFLAAKNLSDAILLSDILRVNTEITKAPLSASMIKRYDEHHQDLTLLKALVRQQLPEKYKEIFFDQSKNGYAGYIDGGASQEEFYKFIKPILEKMDGTEELLVKLNREDLLRKQRTFDNGSIPHQIHLGELHAILRRQEDFYPFLKDNREKIEKILTFRIPYYVGPLARGNSRFAWMTRKSEETITPWNFEEVVDKGASAQSFIERMTNFDKNLPNEKVLPKHSLLYEYFTVYNELTKVKYVTEGMRKPAFLSGEQKKAIVDLLFKTNRKVTVKQLKEDYFKKIECFDSVEISGVEDRFNASLGTYHDLLKIIKDKDFLDNEENEDILEDIVLTLTLFEDREMIEERLKTYAHLFDDKVMKQLKRRRYTGWGRLSRKLINGIRDKQSGKTILDFLKSDGFANRNFMQLIHDDSLTFKEDIQKAQVSGQGDSLHEHIANLAGSPAIKKGILQTVKVVDELVKVMGRHKPENIVIEMARENQTTQKGQKNSRERMKRIEEGIKELGSQILKEHPVENTQLQNEKLYLYYLQNGRDMYVDQELDINRLSDYDVDHIVPQSFLKDDSIDNKVLTRSDKNRGKSDNVPSEEVVKKMKNYWRQLLNAKLITQRKFDNLTKAERGGLSELDKAGFIKRQLVETRQITKHVAQILDSRMNTKYDENDKLIREVKVITLKSKLVSDFRKDFQFYKVREINNYHHAHDAYLNAVVGTALIKKYPKTAHAEIMALRQGGLVMQNYRLIDATLYVTFEPCVMCAGAMIHSRIGRVVFGVRNAKTGAAGSLMDVLHYPGMNHRVEITEGILADECAALLCYFFRMPRQVFNAQKKAQSSTDGSSGSETPGTSESATPESSGSEVEFSHEYWMRHALTLAKRARDEREVPVGAVLVLNNRVIGEGWNRAIGLHDPLESEFVYGDYKVYDVRKMIAKSEQEIGKATAKYFFYSNIMNFFKTEITLANGEIRKRPLIETNGETGEIVWDKGRDFATVRKVLSMPQVNIVKKTEVQTGGFSKESILPKRNSDKLIARKKDWDPKKYGGFDSPTVAYSVLVVAKVEKGKSKKLKSVKELLGITIMERSSFEKNPIDFLEAKGYKEVKKDLIIKLPKYSLFELENGRKRMLASAGELQKGNELALPSKYVNFLYLASHYEKLKGSPEDNEQKQLFVEQHKHYLDEIIEQISEFSKRVILADANLDKVLSAYNKHRDKPIREQAENIIHLFTLTNLGAPAAFKYFDTTIDRKRYTSTKEVLDATLIHQSITGLYETRIDLSQLGGD

SEQ ID NO: 194 - protein, 1554 aa, Artificial Sequence
  Description of Artificial Sequence: Synthetic polypeptide
MDKKYSIGLAIGTNSVGWAVITDEYKVPSKKFKVLGNTDRHSIKKNLIGALLFDSGETAEATRLKRTARRRYTRRKNRICYLQEIFSNEMAKVDDSFFHRLEESFLVEEDKKHERHPIFGNIVDEVAYHEKYPTIYHLRKKLVDSTDKADLRLIYLALAHMIKFRGHFLIEGDLNPDNSDVDKLFIQLVQTYNQLFEENPINASGVDAKAILSARLSKSRRLENLIAQLPGEKKNGLFGNLIALSLGLTPNFKSNFDLAEDAKLQLSKDTYDDDLDNLLAQIGDQYADLFLAAKNLSDAILLSDILRVNTEITKAPLSASMIKRYDEHHQDLTLLKALVRQQLPEKYKEIFFDQSKNGYAGYIDGGASQEEFYKFIKPILEKMDGTEELLVKLNREDLLRKQRTFDNGSIPHQIHLGELHAILRRQEDFYPFLKDNREKIEKILTFRIPYYVGPLARGNSRFAWMTRKSEETITPWNFEEVVDKGASAQSFIERMTNFDKNLPNEKVLPKHSLLYEYFTVYNELTKVKYVTEGMRKPAFLSGEQKKAIVDLLFKTNRKVTVKQLKEDYFKKIECFDSVEISGVEDRFNASLGTYHDLLKIIKDKDFLDNEENEDILEDIVLTLTLFEDREMIEERLKTYAHLFDDKVMKQLKRRRYTGWGRLSRKLINGIRDKQSGKTILDFLKSDGFANRNFMQLIHDDSLTFKEDIQKAQVSGQGDSLHEHIANLAGSPAIKKGILQTVKVVDELVKVMGRHKPENIVIEMARENQTTQKGQKNSRERMKRIEEGIKELGSQILKEHPVENTQLQNEKLYLYYLQNGRDMYVDQELDINRLSDYDVDHIVPQSFLKDDSIDNKVLTRSDKNRGKSDNVPSEEVVKKMKNYWRQLLNAKLITQRKFDNLTKAERGGLSELDKAGFIKRQLVETRQITKHVAQILDSRMNTKYDENDKLIREVKVITLKSKLVSDFRKDFQFYKVREINNYHHAHDAYLNAVVGTALIKKYPKLESEFVYGDYKVTAHAEIMALRQGGLVMQNYRLIDATLYVTFEPCVMCAGAMIHSRIGRVVFGVRNAKTGAAGSLMDVLHYPGMNHRVEITEGILADECAALLCYFFRMPRQVFNAQKKAQSSTDGSSGSETPGTSESATPESSGSEVEFSHEYWMRHALTLAKRARDEREVPVGAVLVLNNRVIGEGWNRAIGLHDPYDVRKMIAKSEQEIGKATAKYFFYSNIMNFFKTEITLANGEIRKRPLIETNGETGEIVWDKGRDFATVRKVLSMPQVNIVKKTEVQTGGFSKESILPKRNSDKLIARKKDWDPKKYGGFDSPTVAYSVLVVAKVEKGKSKKLKSVKELLGITIMERSSFEKNPIDFLEAKGYKEVKKDLIIKLPKYSLFELENGRKRMLASAGELQKGNELALPSKYVNFLYLASHYEKLKGSPEDNEQKQLFVEQHKHYLDEIIEQISEFSKRVILADANLDKVLSAYNKHRDKPIREQAENIIHLFTLTNLGAPAAFKYFDTTIDRKRYTSTKEVLDATLIHQSITGLYETRIDLSQLGGD

SEQ ID NO: 195 - protein, 1554 aa, Artificial Sequence
  Description of Artificial Sequence: Synthetic polypeptide
MDKKYSIGLAIGTNSVGWAVITDEYKVPSKKFKVLGNTDRHSIKKNLIGALLFDSGETAEATRLKRTARRRYTRRKNRICYLQEIFSNEMAKVDDSFFHRLEESFLVEEDKKHERHPIFGNIVDEVAYHEKYPTIYHLRKKLVDSTDKADLRLIYLALAHMIKFRGHFLIEGDLNPDNSDVDKLFIQLVQTYNQLFEENPINASGVDAKAILSARLSKSRRLENLIAQLPGEKKNGLFGNLIALSLGLTPNFKSNFDLAEDAKLQLSKDTYDDDLDNLLAQIGDQYADLFLAAKNLSDAILLSDILRVNTEITKAPLSASMIKRYDEHHQDLTLLKALVRQQLPEKYKEIFFDQSKNGYAGYIDGGASQEEFYKFIKPILEKMDGTEELLVKLNREDLLRKQRTFDNGSIPHQIHLGELHAILRRQEDFYPFLKDNREKIEKILTFRIPYYVGPLARGNSRFAWMTRKSEETITPWNFEEVVDKGASAQSFIERMTNFDKNLPNEKVLPKHSLLYEYFTVYNELTKVKYVTEGMRKPAFLSGEQKKAIVDLLFKTNRKVTVKQLKEDYFKKIECFDSVEISGVEDRFNASLGTYHDLLKIIKDKDFLDNEENEDILEDIVLTLTLFEDREMIEERLKTYAHLFDDKVMKQLKRRRYTGWGRLSRKLINGIRDKQSGKTILDFLKSDGFANRNFMQLIHDDSLTFKEDIQKAQVSGQGDSLHEHIANLAGSPAIKKGILQTVKVVDELVKVMGRHKPENIVIEMARENQTTQKGQKNSRERMKRIEEGIKELGSQILKEHPVENTQLQNEKLYLYYLQNGRDMYVDQELDINRLSDYDVDHIVPQSFLKDDSIDNKVLTRSDKNRGKSDNVPSEEVVKKMKNYWRQLLNAKLITQRKFDNLTKAERGGLSELDKAGFIKRQLVETRQITKHVAQILDSRMNTKYDENDKLIREVKVITLKSKLVSDFRKDFQFYKVREINNYHHAHDAYLNAVVGTALIKKYPKLESEFVYGDYKVYDVRKMITAHAEIMALRQGGLVMQNYRLIDATLYVTFEPCVMCAGAMIHSRIGRVVFGVRNAKTGAAGSLMDVLHYPGMNHRVEITEGILADECAALLCYFFRMPRQVFNAQKKAQSSTDGSSGSETPGTSESATPESSGSEVEFSHEYWMRHALTLAKRARDEREVPVGAVLVLNNRVIGEGWNRAIGLHDPAKSEQEIGKATAKYFFYSNIMNFFKTEITLANGEIRKRPLIETNGETGEIVWDKGRDFATVRKVLSMPQVNIVKKTEVQTGGFSKESILPKRNSDKLIARKKDWDPKKYGGFDSPTVAYSVLVVAKVEKGKSKKLKSVKELLGITIMERSSFEKNPIDFLEAKGYKEVKKDLIIKLPKYSLFELENGRKRMLASAGELQKGNELALPSKYVNFLYLASHYEKLKGSPEDNEQKQLFVEQHKHYLDEIIEQISEFSKRVILADANLDKVLSAYNKHRDKPIREQAENIIHLFTLTNLGAPAAFKYFDTTIDRKRYTSTKEVLDATLIHQSITGLYETRIDLSQLGGD

SEQ ID NO: 196 - protein, 1554 aa, Artificial Sequence
  Description of Artificial Sequence: Synthetic polypeptide
MDKKYSIGLAIGTNSVGWAVITDEYKVPSKKFKVLGNTDRHSIKKNLIGALLFDSGETAEATRLKRTARRRYTRRKNRICYLQEIFSNEMAKVDDSFFHRLEESFLVEEDKKHERHPIFGNIVDEVAYHEKYPTIYHLRKKLVDSTDKADLRLIYLALAHMIKFRGHFLIEGDLNPDNSDVDKLFIQLVQTYNQLFEENPINASGVDAKAILSARLSKSRRLENLIAQLPGEKKNGLFGNLIALSLGLTPNFKSNFDLAEDAKLQLSKDTYDDDLDNLLAQIGDQYADLFLAAKNLSDAILLSDILRVNTEITKAPLSASMIKRYDEHHQDLTLLKALVRQQLPEKYKEIFFDQSKNGYAGYIDGGASQEEFYKFIKPILEKMDGTEELLVKLNREDLLRKQRTFDNGSIPHQIHLGELHAILRRQEDFYPFLKDNREKIEKILTFRIPYYVGPLARGNSRFAWMTRKSEETITPWNFEEVVDKGASAQSFIERMTNFDKNLPNEKVLPKHSLLYEYFTVYNELTKVKYVTEGMRKPAFLSGEQKKAIVDLLFKTNRKVTVKQLKEDYFKKIECFDSVEISGVEDRFNASLGTYHDLLKIIKDKDFLDNEENEDILEDIVLTLTLFEDREMIEERLKTYAHLFDDKVMKQLKRRRYTGWGRLSRKLINGIRDKQSGKTILDFLKSDGFANRNFMQLIHDDSLTFKEDIQKAQVSGQGDSLHEHIANLAGSPAIKKGILQTVKVVDELVKVMGRHKPENIVIEMARENQTTQKGQKNSRERMKRIEEGIKELGSQILKEHPVENTQLQNEKLYLYYLQNGRDMYVDQELDINRLSDYDVDHIVPQSFLKDDSIDNKVLTRSDKNRGKSDNVPSEEVVKKMKNYWRQLLNAKLITQRKFDNLTKAERGGLSELDKAGFIKRQLVETRQITKHVAQILDSRMNTKYDENDKLIREVKVITLKSKLVSDFRKDFQFYKVREINNYHHAHDAYLNAVVGTALIKKYPKLESEFVYGDYKVYDVRKMIAKSEQEITAHAEIMALRQGGLVMQNYRLIDATLYVTFEPCVMCAGAMIHSRIGRVVFGVRNAKTGAAGSLMDVLHYPGMNHRVEITEGILADECAALLCYFFRMPRQVFNAQKKAQSSTDGSSGSETPGTSESATPESSGSEVEFSHEYWMRHALTLAKRARDEREVPVGAVLVLNNRVIGEGWNRAIGLHDPGKATAKYFFYSNIMNFFKTEITLANGEIRKRPLIETNGETGEIVWDKGRDFATVRKVLSMPQVNIVKKTEVQTGGFSKESILPKRNSDKLIARKKDWDPKKYGGFDSPTVAYSVLVVAKVEKGKSKKLKSVKELLGITIMERSSFEKNPIDFLEAKGYKEVKKDLIIKLPKYSLFELENGRKRMLASAGELQKGNELALPSKYVNFLYLASHYEKLKGSPEDNEQKQLFVEQHKHYLDEIIEQISEFSKRVILADANLDKVLSAYNKHRDKPIREQAENIIHLFTLTNLGAPAAFKYFDTTIDRKRYTSTKEVLDATLIHQSITGLYETRIDLSQLGGD

SEQ ID NO: 197 - protein, 1554 aa, Artificial Sequence
  Description of Artificial Sequence: Synthetic polypeptide
MDKKYSIGLAIGTNSVGWAVITDEYKVPSKKFKVLGNTDRHSIKKNLIGALLFDSGETAEATRLKRTARRRYTRRKNRICYLQEIFSNEMAKVDDSFFHRLEESFLVEEDKKHERHPIFGNIVDEVAYHEKYPTIYHLRKKLVDSTDKADLRLIYLALAHMIKFRGHFLIEGDLNPDNSDVDKLFIQLVQTYNQLFEENPINASGVDAKAILSARLSKSRRLENLIAQLPGEKKNGLFGNLIALSLGLTPNFKSNFDLAEDAKLQLSKDTYDDDLDNLLAQIGDQYADLFLAAKNLSDAILLSDILRVNTEITKAPLSASMIKRYDEHHQDLTLLKALVRQQLPEKYKEIFFDQSKNGYAGYIDGGASQEEFYKFIKPILEKMDGTEELLVKLNREDLLRKQRTFDNGSIPHQIHLGELHAILRRQEDFYPFLKDNREKIEKILTFRIPYYVGPLARGNSRFAWMTRKSEETITPWNFEEVVDKGASAQSFIERMTNFDKNLPNEKVLPKHSLLYEYFTVYNELTKVKYVTEGMRKPAFLSGEQKKAIVDLLFKTNRKVTVKQLKEDYFKKIECFDSVEISGVEDRFNASLGTYHDLLKIIKDKDFLDNEENEDILEDIVLTLTLFEDREMIEERLKTYAHLFDDKVMKQLKRRRYTGWGRLSRKLINGIRDKQSGKTILDFLKSDGFANRNFMQLIHDDSLTFKEDIQKAQVSGQGDSLHEHIANLAGSPAIKKGILQTVKVVDELVKVMGRHKPENIVIEMARENQTTQKGQKNSRERMKRIEEGIKELGSQILKEHPVENTQLQNEKLYLYYLQNGRDMYVDQELDINRLSDYDVDHIVPQSFLKDDSIDNKVLTRSDKNRGKSDNVPSEEVVKKMKNYWRQLLNAKLITQRKFDNLTKAERGGLSELDKAGFIKRQLVETRQITKHVAQILDSRMNTKYDENDKLIREVKVITLKSKLVSDFRKDFQFYKVREINNYHHAHDAYLNAVVGTALIKKYPKLESEFVYGDYKVYDVRKMIAKSEQEIGKATAKYFFYSTAHAEIMALRQGGLVMQNYRLIDATLYVTFEPCVMCAGAMIHSRIGRVVFGVRNAKTGAAGSLMDVLHYPGMNHRVEITEGILADECAALLCYFFRMPRQVFNAQKKAQSSTDGSSGSETPGTSESATPESSGSEVEFSHEYWMRHALTLAKRARDEREVPVGAVLVLNNRVIGEGWNRAIGLHDPNIMNFFKTEITLANGEIRKRPLIETNGETGEIVWDKGRDFATVRKVLSMPQVNIVKKTEVQTGGFSKESILPKRNSDKLIARKKDWDPKKYGGFDSPTVAYSVLVVAKVEKGKSKKLKSVKELLGITIMERSSFEKNPIDFLEAKGYKEVKKDLIIKLPKYSLFELENGRKRMLASAGELQKGNELALPSKYVNFLYLASHYEKLKGSPEDNEQKQLFVEQHKHYLDEIIEQISEFSKRVILADANLDKVLSAYNKHRDKPIREQAENIIHLFTLTNLGAPAAFKYFDTTIDRKRYTSTKEVLDATLIHQSITGLYETRIDLSQLGGD

SEQ ID NO: 198 - protein, 1554 aa, Artificial Sequence
  Description of Artificial Sequence: Synthetic polypeptide
MDKKYSIGLAIGTNSVGWAVITDEYKVPSKKFKVLGNTDRHSIKKNLIGALLFDSGETAEATRLKRTARRRYTRRKNRICYLQEIFSNEMAKVDDSFFHRLEESFLVEEDKKHERHPIFGNIVDEVAYHEKYPTIYHLRKKLVDSTDKADLRLIYLALAHMIKFRGHFLIEGDLNPDNSDVDKLFIQLVQTYNQLFEENPINASGVDAKAILSARLSKSRRLENLIAQLPGEKKNGLFGNLIALSLGLTPNFKSNFDLAEDAKLQLSKDTYDDDLDNLLAQIGDQYADLFLAAKNLSDAILLSDILRVNTEITKAPLSASMIKRYDEHHQDLTLLKALVRQQLPEKYKEIFFDQSKNGYAGYIDGGASQEEFYKFIKPILEKMDGTEELLVKLNREDLLRKQRTFDNGSIPHQIHLGELHAILRRQEDFYPFLKDNREKIEKILTFRIPYYVGPLARGNSRFAWMTRKSEETITPWNFEEVVDKGASAQSFIERMTNFDKNLPNEKVLPKHSLLYEYFTVYNELTKVKYVTEGMRKPAFLSGEQKKAIVDLLFKTNRKVTVKQLKEDYFKKIECFDSVEISGVEDRFNASLGTYHDLLKIIKDKDFLDNEENEDILEDIVLTLTLFEDREMIEERLKTYAHLFDDKVMKQLKRRRYTGWGRLSRKLINGIRDKQSGKTILDFLKSDGFANRNFMQLIHDDSLTFKEDIQKAQVSGQGDSLHEHIANLAGSPAIKKGILQTVKVVDELVKVMGRHKPENIVIEMARENQTTQKGQKNSRERMKRIEEGIKELGSQILKEHPVENTQLQNEKLYLYYLQNGRDMYVDQELDINRLSDYDVDHIVPQSFLKDDSIDNKVLTRSDKNRGKSDNVPSEEVVKKMKNYWRQLLNAKLITQRKFDNLTKAERGGLSELDKAGFIKRQLVETRQITKHVAQILDSRMNTKYDENDKLIREVKVITLKSKLVSDFRKDFQFYKVREINNYHHAHDAYLNAVVGTALIKKYPKLESEFVYGDYKVYDVRKMIAKSEQEIGKATAKYFFYSNIMNFFKTEITLANTAHAEIMALRQGGLVMQNYRLIDATLYVTFEPCVMCAGAMIHSRIGRVVFGVRNAKTGAAGSLMDVLHYPGMNHRVEITEGILADECAALLCYFFRMPRQVFNAQKKAQSSTDGSSGSETPGTSESATPESSGSEVEFSHEYWMRHALTLAKRARDEREVPVGAVLVLNNRVIGEGWNRAIGLHDPGEIRKRPLIETNGETGEIVWDKGRDFATVRKVLSMPQVNIVKKTEVQTGGFSKESILPKRNSDKLIARKKDWDPKKYGGFDSPTVAYSVLVVAKVEKGKSKKLKSVKELLGITIMERSSFEKNPIDFLEAKGYKEVKKDLIIKLPKYSLFELENGRKRMLASAGELQKGNELALPSKYVNFLYLASHYEKLKGSPEDNEQKQLFVEQHKHYLDEIIEQISEFSKRVILADANLDKVLSAYNKHRDKPIREQAENIIHLFTLTNLGAPAAFKYFDTTIDRKRYTSTKEVLDATLIHQSITGLYETRIDLSQLGGD

SEQ ID NO: 199 - protein, 1554 aa, Artificial Sequence
  Description of Artificial Sequence: Synthetic polypeptide
MDKKYSIGLAIGTNSVGWAVITDEYKVPSKKFKVLGNTDRHSIKKNLIGALLFDSGETAEATRLKRTARRRYTRRKNRICYLQEIFSNEMAKVDDSFFHRLEESFLVEEDKKHERHPIFGNIVDEVAYHEKYPTIYHLRKKLVDSTDKADLRLIYLALAHMIKFRGHFLIEGDLNPDNSDVDKLFIQLVQTYNQLFEENPINASGVDAKAILSARLSKSRRLENLIAQLPGEKKNGLFGNLIALSLGLTPNFKSNFDLAEDAKLQLSKDTYDDDLDNLLAQIGDQYADLFLAAKNLSDAILLSDILRVNTEITKAPLSASMIKRYDEHHQDLTLLKALVRQQLPEKYKEIFFDQSKNGYAGYIDGGASQEEFYKFIKPILEKMDGTEELLVKLNREDLLRKQRTFDNGSIPHQIHLGELHAILRRQEDFYPFLKDNREKIEKILTFRIPYYVGPLARGNSRFAWMTRKSEETITPWNFEEVVDKGASAQSFIERMTNFDKNLPNEKVLPKHSLLYEYFTVYNELTKVKYVTEGMRKPAFLSGEQKKAIVDLLFKTNRKVTVKQLKEDYFKKIECFDSVEISGVEDRFNASLGTYHDLLKIIKDKDFLDNEENEDILEDIVLTLTLFEDREMIEERLKTYAHLFDDKVMKQLKRRRYTGWGRLSRKLINGIRDKQSGKTILDFLKSDGFANRNFMQLIHDDSLTFKEDIQKAQVSGQGDSLHEHIANLAGSPAIKKGILQTVKVVDELVKVMGRHKPENIVIEMARENQTTQKGQKNSRERMKRIEEGIKELGSQILKEHPVENTQLQNEKLYLYYLQNGRDMYVDQELDINRLSDYDVDHIVPQSFLKDDSIDNKVLTRSDKNRGKSDNVPSEEVVKKMKNYWRQLLNAKLITQRKFDNLTKAERGGLSELDKAGFIKRQLVETRQITKHVAQILDSRMNTKYDENDKLIREVKVITLKSKLVSDFRKDFQFYKVREINNYHHAHDAYLNAVVGTALIKKYPKLESEFVYGDYKVYDVRKMIAKSEQEIGKATAKYFFYSNIMNFFKTEITLANGEIRKRPLIETNGETGEIVWDKGRDFATVRKVLSMPQVNIVKKTEVQTGGFSKESILPKRNSDKLIARKKDWDPKKYGGFDSPTVAYSVLVVAKVEKGKSKKLKSVKELLGITIMERSSFEKNPIDFLEAKGYKEVKKDLIIKLPKYSLFELENGRKRMLASAGELQKGNELALPSKYVNFLYLASHYEKLKGTAHAEIMALRQGGLVMQNYRLIDATLYVTFEPCVMCAGAMIHSRIGRVVFGVRNAKTGAAGSLMDVLHYPGMNHRVEITEGILADECAALLCYFFRMPRQVFNAQKKAQSSTDGSSGSETPGTSESATPESSGSEVEFSHEYWMRHALTLAKRARDEREVPVGAVLVLNNRVIGEGWNRAIGLHDPSPEDNEQKQLFVEQHKHYLDEIIEQISEFSKRVILADANLDKVLSAYNKHRDKPIREQAENIIHLFTLTNLGAPAAFKYFDTTIDRKRYTSTKEVLDATLIHQSITGLYETRIDLSQLGGD

SEQ ID NO: 200 - protein, 208 aa, Petromyzon marinus
MTDAEYVRIHEKLDIYTFKKQFFNNKKSVSHRCYVLFELKRRGERRACFWGYAVNKPQSGTERGIHAEIFSIRKVEEYLRDNPGQFTINWYSSWSPCADCAEKILEWYNQELRGNGHTLKIWACKLYYEKNARNQIGLWNLRDNGVGLNVMVSEHYQCCRKIFIQSSHNQLNENRWLEKTLKRAEKRRSELSIMIQVKILHTTKSPAV

SEQ ID NO: 201 - DNA, 766 bp, Petromyzon marinus
tgacacgacacagccgtgtatatgaggaagggtagctggatggggggggggggaatacgttcagagaggacattagcgagcgtcttgttggtggccttgagtctagacacctgcagacatgaccgacgctgagtacgtgagaatccatgagaagttggacatctacacgtttaagaaacagtttttcaacaacaaaaaatccgtgtcgcatagatgctacgttctctttgaattaaaacgacggggtgaacgtagagcgtgtttttggggctatgctgtgaataaaccacagagcgggacagaacgtggaattcacgccgaaatctttagcattagaaaagtcgaagaatacctgcgcgacaaccccggacaattcacgataaattggtactcatcctggagtccttgtgcagattgcgctgaaaagatcttagaatggtataaccaggagctgcgggggaacggccacactttgaaaatctgggcttgcaaactctattacgagaaaaatgcgaggaatcaaattgggctgtggaacctcagagataacggggttgggttgaatgtaatggtaagtgaacactaccaatgttgcaggaaaatattcatccaatcgtcgcacaatcaattgaatgagaatagatggcttgagaagactttgaagcgagctgaaaaacgacggagcgagttgtccattatgattcaggtaaaaatactccacaccactaagagtcctgctgtttaagaggctatgcggatggttttc

SEQ ID NO: 202 - protein, 145 aa, Homo sapiens
MDSLLMNRRKFLYQFKNVRWAKGRRETYLCYVVKRRDSATSFSLDFGYLRNKNGCHVELLFLRYISDWDLDPGRCYRVTWFTSWSPCYDCARHVADFLRGNPNLSLRIFTARLYFCEDRKAEPEGLRRLHRAGVQIAIMTFKAPV

SEQ ID NO: 203 - DNA, 10681 bp, Homo sapiens
agagaaccatcattaattgaagtgagatttttctggcctgagacttgcagggaggcaagaagacactctggacaccactatggacaggtaaagaggcagtcttctcgtgggtgattgcactggccttcctctcagagcaaatctgagtaatgagactggtagctatccctttctctcatgtaactgtctgactgataagatcagcttgatcaatatgcatatatattttttgatctgtctccttttcttctattcagatcttatacgctgtcagcccaattctttctgtttcagacttctcttgatttccctctttttcatgtggcaaaagaagtagtgcgtacaatgtactgattcgtcctgagatttgtaccatggttgaaactaatttatggtaataatattaacatagcaaatctttagagactcaaatcatgaaaaggtaatagcagtactgtactaaaaacggtagtgctaattttcgtaataattttgtaaatattcaacagtaaaacaacttgaagacacactttcctagggaggcgttactgaaataatttagctatagtaagaaaatttgtaattttagaaatgccaagcattctaaattaattgcttgaaagtcactatgattgtgtccattataaggagacaaattcattcaagcaagttatttaatgttaaaggcccaattgttaggcagttaatggcacttttactattaactaatctttccatttgttcagacgtagcttaacttacctcttaggtgtgaatttggttaaggtcctcataatgtctttatgtgcagtttttgataggttattgtcatagaacttattctattcctacatttatgattactatggatgtatgagaataacacctaatccttatactttacctcaatttaactcctttataaagaacttacattacagaataaagattttttaaaaatatatttttttgtagagacagggtcttagcccagccgaggctggtctctaagtcctggcccaagcgatcctcctgcctgggcctcctaaagtgctggaattatagacatgagccatcacatccaatatacagaataaagatttttaatggaggatttaatgttcttcagaaaattttcttgaggtcagacaatgtcaaatgtctcctcagtttacactgagattttgaaaacaagtctgagctataggtccttgtgaagggtccattggaaatacttgttcaaagtaaaatggaaagcaaaggtaaaatcagcagttgaaattcagagaaagacagaaaaggagaaaagatgaaattcaacaggacagaagggaaatatattatcattaaggaggacagtatctgtagagctcattagtgatggcaaaatgacttggtcaggattatttttaacccgcttgtttctggtttgcacggctggggatgcagctagggttctgcctcagggagcacagctgtccagagcagctgtcagcctgcaagcctgaaacactccctcggtaaagtccttcctactcaggacagaaatgacgagaacagggagctggaaacaggcccctaaccagagaagggaagtaatggatcaacaaagttaactagcaggtcaggatcacgcaattcatttcactctgactggtaacatgtgacagaaacagtgtaggcttattgtattttcatgtagagtaggacccaaaaatccacccaaagtcctttatctatgccacatccttcttatctatacttccaggacactttttcttccttatgataaggctctctctctctccacacacacacacacacacacacacacacacacacacacacacacaaacacacaccccgccaaccaaggtgcatgtaaaaagatgtagattcctctgcctttctcatctacacagcccaggagggtaagttaatataagagggatttattggtaagagatgatgcttaatctgtttaacactgggcctcaaagagagaatttcttttcttctgtacttattaagcacctattatgtgttgagcttatatatacaaagggttattatatgctaatatagtaatagtaatggtggttggtactatggtaattaccataaaaattattatccttttaaaataaagctaattattattggatcttttttagtattcattttatgttttttatgtttttgattttttaaaagacaatctcaccctgttacccaggctggagtgcagtggtgcaatcatagctttctgcagtcttgaactcctgggctcaagcaatcctcctgccttggcctcccaaagtgttgggatacagtcatgagccactgcatctggcctaggatccatttagattaaaatatgcattttaaattttaaaataatatggctaatttttaccttatgtaatgtgtatactggcaataaatctagtttgctgcctaaagtttaaagtgctttccagtaagcttcatgtacgtgaggggagacatttaaagtgaaacagacagccaggtgtggtggctcacgcctgtaatcccagcactctgggaggctgaggtgggtggatcgcttgagccctggagttcaagaccagcctgagcaacatggcaaaacgctgtttctataacaaaaattagccgggcatggtggcatgtgcctgtggtcccagctactagggggctgaggcaggagaatcgttggagcccaggaggtcaaggctgcactgagcagtgcttgcgccactgcactccagcctgggtgacaggaccagaccttgcctcaaaaaaataagaagaaaaattaaaaataaatggaaacaactacaaagagctgttgtcctagatgagctacttagttaggctgatattttggtatttaacttttaaagtcagggtctgtcacctgcactacattattaaaatatcaattctcaatgtatatccacacaaagactggtacgtgaatgttcatagtacctttattcacaaaaccccaaagtagagactatccaaatatccatcaacaagtgaacaaataaacaaaatgtgctatatccatgcaatggaataccaccctgcagtacaaagaagctacttggggatgaatcccaaagtcatgacgctaaatgaaagagtcagacatgaaggaggagataatgtatgccatacgaaattctagaaaatgaaagtaacttatagttacagaaagcaaatcagggcaggcatagaggctcacacctgtaatcccagcactttgagaggccacgtgggaagattgctagaactcaggagttcaagaccagcctgggcaacacagtgaaactccattctccacaaaaatgggaaaaaaagaaagcaaatcagtggttgtcctgtggggaggggaaggactgcaaagagggaagaagctctggtggggtgagggtggtgattcaggttctgtatcctgactgtggtagcagtttggggtgtttacatccaaaaatattcgtagaattatgcatcttaaatgggtggagtttactgtatgtaaattatacctcaatgtaagaaaaaataatgtgtaagaaaactttcaattctcttgccagcaaacgttattcaaattcctgagccctttacttcgcaaattctctgcacttctgccccgtaccattaggtgacagcactagctccacaaattggataaatgcatttctggaaaagactagggacaaaatccaggcatcacttgtgctttcatatcaaccatgctgtacagcttgtgttgctgtctgcagctgcaatggggactcttgatttctttaaggaaacttgggttaccagagtatttccacaaatgctattcaaattagtgcttatgatatgcaagacactgtgctaggagccagaaaacaaagaggaggagaaatcagtcattatgtgggaacaacatagcaagatatttagatcattttgactagttaaaaaagcagcagagtacaaaatcacacatgcaatcagtataatccaaatcatgtaaatatgtgcctgtagaaagactagaggaataaacacaagaatcttaacagtcattgtcattagacactaagtctaattattattattagacactatgatatttgagatttaaaaaatctttaatattttaaaatttagagctcttctatttttccatagtattcaagtttgacaatgatcaagtattactctttctttttttttttttttttttttttttgagatggagttttggtcttgttgcccatgctggagtggaatggcatgaccatagctcactgcaacctccacctcctgggttcaagcaaagctgtcgcctcagcctcccgggtagatgggattacaggcgcccaccaccacactcggctaatgtttgtatttttagtagagatggggtttcaccatgttggccaggctggtctcaaactcctgacctcagaggatccacctgcctcagcctcccaaagtgctgggattacagatgtaggccactgcgcccggccaagtattgctcttatacattaaaaaacaggtgtgagccactgcgcccagccaggtattgctcttatacattaaaaaataggccggtgcagtggctcacgcctgtaatcccagcactttgggaagccaaggcgggcagaacacccgaggtcaggagtccaaggccagcctggccaagatggtgaaaccccgtctctattaaaaatacaaacattacctgggcatgatggtgggcgcctgtaatcccagctactcaggaggctgaggcaggaggatccgcggagcctggcagatctgcctgagcctgggaggttgaggctacagtaagccaagatcatgccagtatacttcagcctgggcgacaaagtgagaccgtaacaaaaaaaaaaaaatttaaaaaaagaaatttagatcaagatccaactgtaaaaagtggcctaaacaccacattaaagagtttggagtttattctgcaggcagaagagaaccatcagggggtcttcagcatgggaatggcatggtgcacctggtttttgtgagatcatggtggtgacagtgtggggaatgttattttggagggactggaggcagacagaccggttaaaaggccagcacaacagataaggaggaagaagatgagggcttggaccgaagcagagaagagcaaacagggaaggtacaaattcaagaaatattggggggtttgaatcaacacatttagatgattaattaaatatgaggactgaggaataagaaatgagtcaaggatggttccaggctgctaggctgcttacctgaggtggcaaagtcgggaggagtggcagtttaggacagggggcagttgaggaatattgttttgatcattttgagtttgaggtacaagttggacacttaggtaaagactggaggggaaatctgaatatacaattatgggactgaggaacaagtttattttattttttgtttcgttttcttgttgaagaacaaatttaattgtaatcccaagtcatcagcatctagaagacagtggcaggaggtgactgtcttgtgggtaagggtttggggtccttgatgagtatctctcaattggccttaaatataagcaggaaaaggagtttatgatggattccaggctcagcagggctcaggagggctcaggcagccagcagaggaagtcagagcatcttctttggtttagcccaagtaatgacttccttaaaaagctgaaggaaaatccagagtgaccagattataaactgtactcttgcattttctctccctcctctcacccacagcctcttgatgaaccggaggaagtttctttaccaattcaaaaatgtccgctgggctaagggtcggcgtgagacctacctgtgctacgtagtgaagaggcgtgacagtgctacatccttttcactggactttggttatcttcgcaataaggtatcaattaaagtcggctttgcaagcagtttaatggtcaactgtgagtgcttttagagccacctgctgatggtattacttccatccttttttggcatttgtgtctctatcacattcctcaaatccttttttttatttctttttccatgtccatgcacccatattagacatggcccaaaatatgtgatttaattcctccccagtaatgctgggcaccctaataccactccttccttcagtgccaagaacaactgctcccaaactgtttaccagctttcctcagcatctgaattgcctttgagattaattaagctaaaagcatttttatatgggagaatattatcagcttgtccaagcaaaaattttaaatgtgaaaaacaaattgtgtcttaagcatttttgaaaattaaggaagaagaatttgggaaaaaattaacggtggctcaattctgtcttccaaatgatttcttttccctcctactcacatgggtcgtaggccagtgaatacattcaacatggtgatccccagaaaactcagagaagcctcggctgatgattaattaaattgatctttcggctacccgagagaattacatttccaagagacttcttcaccaaaatccagatgggtttacataaacttctgcccacgggtatctcctctctcctaacacgctgtgacgtctgggcttggtggaatctcagggaagcatccgtggggtggaaggtcatcgtctggctcgttgtttgatggttatattaccatgcaattttctttgcctacatttgtattgaatacatcccaatctccttcctattcggtgacatgacacattctatttcagaaggctttgattttatcaagcactttcatttacttctcatggcagtgcctattacttctcttacaatacccatctgtctgctttaccaaaatctatttccccttttcagatcctcccaaatggtcctcataaactgtcctgcctccacctagtggtccaggtatatttccacaatgttacatcaacaggcacttctagccattttccttctcaaaaggtgcaaaaagcaacttcataaacacaaattaaatcttcggtgaggtagtgtgatgctgcttcctcccaactcagcgcacttcgtcttcctcattccacaaaaacccatagccttccttcactctgcaggactagtgctgccaagggttcagctctacctactggtgtgctcttttgagcaagttgcttagcctctctgtaacacaaggacaatagctgcaagcatccccaaagatcattgcaggagacaatgactaaggctaccagagccgcaataaaagtcagtgaattttagcgtggtcctctctgtctctccagaacggctgccacgtggaattgctcttcctccgctacatctcggactgggacctagaccctggccgctgctaccgcgtcacctggttcacctcctggagcccctgctacgactgtgcccgacatgtggccgactttctgcgagggaaccccaacctcagtctgaggatcttcaccgcgcgcctctacttctgtgaggaccgcaaggctgagcccgaggggctgcggcggctgcaccgcgccggggtgcaaatagccatcatgaccttcaaaggtgcgaaagggccttccgcgcaggcgcagtgcagcagcccgcattcgggattgcgatgcggaatgaatgagttagtggggaagctcgaggggaagaagtgggcggggattctggttcacctctggagccgaaattaaagattagaagcagagaaaagagtgaatggctcagagacaaggccccgaggaaatgagaaaatggggccagggttgcttctttcccctcgatttggaacctgaactgtcttctacccccatatccccgcctttttttcctttttttttttttgaagattatttttactgctggaatacttttgtagaaaaccacgaaagaactttcaaagcctgggaagggctgcatgaaaattcagttcgtctctccagacagcttcggcgcatccttttggtaaggggcttcctcgctttttaaattttctttctttctctacagtcttttttggagtttcgtatatttcttatattttcttattgttcaatcactctcagttttcatctgatgaaaactttatttctcctccacatcagctttttcttctgctgtttcaccattcagagccctctgctaaggttccttttccctcccttttctttcttttgttgtttcacatctttaaatttctgtctctccccagggttgcgtttccttcctggtcagaattcttttctcctttttttttttttttttttttttttttaaacaaacaaacaaaaaacccaaaaaaactctttcccaatttactttcttccaacatgttacaaagccatccactcagtttagaagactctccggccccaccgacccccaacctcgttttgaagccattcactcaatttgcttctctctttctctacagcccctgtatgaggttgatgacttacgagacgcatttcgtactttgggactttgatagcaacttccaggaatgtcacacacgatgaaatatctctgctgaagacagtggataaaaaacagtccttcaagtcttctctgtttttattcttcaactctcactttcttagagtttacagaaaaaatatttatatacgactctttaaaaagatctatgtcttgaaaatagagaaggaacacaggtctggccagggacgtgctgcaattggtgcagttttgaatgcaacattgtcccctactgggaataacagaactgcaggacctgggagcatcctaaagtgtcaacgtttttctatgacttttaggtaggatgagagcagaaggtagatcctaaaaagcatggtgagaggatcaaatgtttttatatcaacatcctttattatttgattcatttgagttaacagtggtgttagtgatagatttttctattcttttcccttgacgtttactttcaagtaacacaaactcttccatcaggccatgatctataggacctcctaatgagagtatctgggtgattgtgaccccaaaccatctctccaaagcattaatatccaatcatgcgctgtatgttttaatcagcagaagcatgtttttatgtttgtacaaaagaagattgttatgggtggggatggaggtatagaccatgcatggtcaccttcaagctactttaataaaggatcttaaaatgggcaggaggactgtgaacaagacaccctaataatgggttgatgtctgaagtagcaaatcttctggaaacgcaaactcttttaaggaagtccctaatttagaaacacccacaaacttcacatatcataattagcaaacaattggaaggaagttgcttgaatgttggggagaggaaaatctattggctctcgtgggtctcttcatctcagaaatgccaatcaggtcaaggtttgctacattttgtatgtgtgtgatgcttctcccaaaggtatattaactatataagagagttgtgacaaaacagaatgataaagctgcgaaccgtggcacacgctcatagttctagctgcttgggaggttgaggagggaggatggcttgaacacaggtgttcaaggccagcctgggcaacataacaagatcctgtctctcaaaaaaaaaaaaaaaaaaaagaaagagagagggccgggcgtggtggctcacgcctgtaatcccagcactttgggaggccgagccgggcggatcacctgtggtcaggagtttgagaccagcctggccaacatggcaaaaccccgtctgtactcaaaatgcaaaaattagccaggcgtggtagcaggcacctgtaatcccagctacttgggaggctgaggcaggagaatcgcttgaacccaggaggtggaggttgcagtaagctgagatcgtgccgttgcactccagcctgggcgacaagagcaagactctgtctcagaaaaaaaaaaaaaaaagagagagagagagaaagagaacaatatttgggagagaaggatggggaagcattgcaaggaaattgtgctttatccaacaaaatgtaaggagccaataagggatccctatttgtctcttttggtgtctatttgtccctaacaactgtctttgacagtgagaaaaatattcagaataaccatatccctgtgccgttattacctagcaacccttgcaatgaagatgagcagatccacaggaaaacttgaatgcacaactgtcttattttaatcttattgtacataagtttgtaaaagagttaaaaattgttacttcatgtattcatttatattttatattattttgcgtctaatgattttttattaacatgatttccttttctgatatattgaaatggagtctcaaagcttcataaatttataactttagaaatgattctaataacaacgtatgtaattgtaacattgcagtaatggtgctacgaagccatttctcttgatttttagtaaacttttatgacagcaaatttgcttctggctcactttcaatcagttaaataaatgataaataattttggaagctgtgaagataaaataccaaataaaataatataaaagtgatttatatgaagttaaaataaaaaatcagtatgatggaataaacttg

SEQ ID NO: 204 - protein, 229 aa, Rattus norvegicus [sequence omitted]

SEQ ID NO: 205 - protein, 229 aa, Mus musculus
MSSETGPVAVDPTLRRRIEPHEFEVFFDPRELRKETCLLYEINWGGRHSVWRHTSQNTSNHVEVNFLEKFTTERYFRPNTRCSITWFLSWSPCGECSRAITEFLSRHPYVTLFIYIARLYHHTDQRNRQGLRDLISSGVTIQIMTEQEYCYCWRNFVNYPPSNEAYWPRYPHLWVKLYVLELYCIILGLPPCLKILRRKQPQLTFFTITLQTCHYQRIPPHLLWATGLK

SEQ ID NO: 206 - protein, 229 aa, Mesocricetus auratus
MSSETGPVVVDPTLRRRIEPHEFDAFFDQGELRKETCLLYEIRWGGRHNIWRHTGQNTSRHVEINFIEKFTSERYFYPSTRCSIVWFLSWSPCGECSKAITEFLSGHPNVTLFIYAARLYHHTDQRNRQGLRDLISRGVTIRIMTEQEYCYCWRNFVNYPPSNEVYWPRYPNLWMRLYALELYCIHLGLPPCLKIKRRHQYPLTFFRLNLQSCHYQRIPPHILWATGFI

SEQ ID NO: 207 - protein, 236 aa, Homo sapiens
MTSEKGPSTGDPTLRRRIEPWEFDVFYDPRELRKEACLLYEIKWGMSRKIWRSSGKNTTNHVEVNFIKKFTSERDFHPSMSCSITWFLSWSPCWECSQAIREFLSRHPGVTLVIYVARLFWHMDQQNRQGLRDLVNSGVTIQIMRASEYYHCWRNFVNYPPGDEAHWPQYPPLWMMLYALELHCIILSLPPCLKISRRWQNHLTFFRLHLQNCHYQTIPPHILLATGLIHPSVAWR

SEQ ID NO: 208 - protein, 236 aa, Pongo pygmaeus
MTSEKGPSTGDPTLRRRIESWEFDVFYDPRELRKETCLLYEIKWGMSRKIWRSSGKNTTNHVEVNFIKKFTSERRFHSSISCSITWFLSWSPCWECSQAIREFLSQHPGVTLVIYVARLFWHMDQRNRQGLRDLVNSGVTIQIMRASEYYHCWRNFVNYPPGDEAHWPQYPPLWMMLYALELHCIILSLPPCLKISRRWQNHLAFFRLHLQNCHYQTIPPHILLATGLIHPSVTWR

SEQ ID NO: 209 - protein, 236 aa, Oryctolagus cuniculus
MASEKGPSNKDYTLRRRIEPWEFEVFFDPQELRKEACLLYEIKWGASSKTWRSSGKNTTNHVEVNFLEKLTSEGRLGPSTCCSITWFLSWSPCWECSMAIREFLSQHPGVTLIIFVARLFQHMDRRNRQGLKDLVTSGVTVRVMSVSEYCYCWENFVNYPPGKAAQWPRYPPRWMLMYALELYCIILGLPPCLKISRRHQKQLTFFSLTPQYCHYKMIPPYILLATGLLQPSVPWR

SEQ ID NO: 210 - protein, 235 aa, Monodelphis domestica
MNSKTGPSVGDATLRRRIKPWEFVAFFNPQELRKETCLLYEIKWGNQNIWRHSNQNTSQHAEINFMEKFTAERHFNSSVRCSITWFLSWSPCWECSKAIRKFLDHYPNVTLAIFISRLYWHMDQQHRQGLKELVHSGVTIQIMSYSEYHYCWRNFVDYPQGEEDYWPKYPYLWIMLYVLELHCIILGLPPCLKISGSHSNQLALFSLDLQDCHYQKIPYNVLVATGLVQPFVTWR

SEQ ID NO: 211 - protein, 224 aa, Mus musculus
MAQKEEAAEAAAPASQNGDDLENLEDPEKLKELIDLPPFEIVTGVRLPVNFFKFQFRNVEYSSGRNKTFLCYVVEVQSKGGQAQATQGYLEDEHAGAHAEEAFFNTILPAFDPALKYNVTWYVSSSPCAACADRILKTLSKTKNLRLLILVSRLFMWEEPEVQAALKKLKEAGCKLRIMKPQDFEYIWQNFVEQEEGESKAFEPWEDIQENFLYYEEKLADILK

SEQ ID NO: 212 - protein, 224 aa, Homo sapiens
MAQKEEAAVATEAASQNGEDLENLDDPEKLKELIELPPFEIVTGERLPANFFKFQFRNVEYSSGRNKTFLCYVVEAQGKGGQVQASRGYLEDEHAAAHAEEAFFNTILPAFDPALRYNVTWYVSSSPCAACADRIIKTLSKTKNLRLLILVGRLFMWEEPEIQAALKKLKEAGCKLRIMKPQDFEYVWQNFVEQEEGESKAFQPWEDIQENFLYYEEKLADILK

SEQ ID NO: 213 - protein, 224 aa, Pongo pygmaeus
MAQKEEAAAATEAASQNGEDLENLDDPEKLKELIELPPFEIVTGERLPANFFKFQFRNVEYSSGRNKTFLCYVVEAQGKGGQVQASRGYLEDEHAAAHAEEAFFNTILPAFDPALRYNVTWYVSSSPCAACADRIIKTLSKTKNLRLLILVGRLFMWEELEIQDALKKLKEAGCKLRIMKPQDFEYVWQNFVEQEEGESKAFQPWEDIQENFLYYEEKLADILK

SEQ ID NO: 214 - protein, 224 aa, Bos taurus
MAQKEEAAAAAEPASQNGEEVENLEDPEKLKELIELPPFEIVTGERLPAHYFKFQFRNVEYSSGRNKTFLCYVVEAQSKGGQVQASRGYLEDEHATNHAEEAFFNSIMPTFDPALRYMVTWYVSSSPCAACADRIVKTLNKTKNLRLLILVGRLFMWEEPEIQAALRKLKEAGCRLRIMKPQDFEYIWQNFVEQEEGESKAFEPWEDIQENFLYYEEKLADILK

SEQ ID NO: 215 - protein, 440 aa, Mus musculus
MQPQRLGPRAGMGPFCLGCSHRKCYSPIRNLISQETFKFHFKNLGYAKGRKDTFLCYEVTRKDCDSPVSLHHGVFKNKDNIHAEICFLYWFHDKVLKVLSPREEFKITWYMSWSPCFECAEQIVRFLATHHNLSLDIFSSRLYNVQDPETQQNLCRLVQEGAQVAAMDLYEFKKCWKKFVDNGGRRFRPWKRLLTNFRYQDSKLQEILRPCYISVPSSSSSTLSNICLTKGLPETRFWVEGRRMDPLSEEEFYSQFYNQRVKHLCYYHRMKPYLCYQLEQFNGQAPLKGCLLSEKGKQHAEILFLDKIRSMELSQVTITCYLTWSPCPNCAWQLAAFKRDRPDLILHIYTSRLYFHWKRPFQKGLCSLWQSGILVDVMDLPQFTDCWTNFVNPKRPFWPWKGLEIISRRTQRRLRRIKESWGLQDLVNDFGNLQLGPPMS

SEQ ID NO: 216 - protein, 199 aa, Homo sapiens
MEASPASGPRHLMDPHIFTSNFNNGIGRHKTYLCYEVERLDNGTSVKMDQHRGFLHNQAKNLLCGFYGRHAELRFLDLVPSLQLDPAQIYRVTWFISWSPCFSWGCAGEVRAFLQENTHVRLRIFAARIYDYDPLYKEALQMLRDAGAQVSIMTYDEFKHCWDTFVDHQGCPFQPWDGLDEHSQALSGRLRAILQNQGN

SEQ ID NO: 217 - protein, 382 aa, Homo sapiens
MNPQIRNPMERMYRDTFYDNFENEPILYGRSYTWLCYEVKIKRGRSNLLWDTGVFRGQVYFKPQYHAEMCFLSWFCGNQLPAYKCFQITWFVSWTPCPDCVAKLAEFLSEHPNVTLTISAARLYYYWERDYRRALCRLSQAGARVTIMDYEEFAYCWENFVYNEGQQFMPWYKFDENYAFLHRTLKEILRYLMDPDTFTFNFNNDPLVLRRRQTYLCYEVERLDNGTWVLMDQHMGFLCNEAKNLLCGFYGRHAELRFLDLVPSLQLDPAQIYRVTWFISWSPCFSWGCAGEVRAFLQENTHVRLRIFAARIYDYDPLYKEALQMLRDAGAQVSIMTYDEFEYCWDTFVYRQGCPFQPWDGLEEHSQALSGRLRAILQNQGN

SEQ ID NO: 218 - protein, 190 aa, Homo sapiens
MNPQIRNPMKAMYPGTFYFQFKNLWEANDRNETWLCFTVEGIKRRSVVSWKTGVFRNQVDSETHCHAERCFLSWFCDDILSPNTKYQVTWYTSWSPCPDCAGEVAEFLARHSNVNLTIFTARLYYFQYPCYQEGLRSLSQEGVAVEIMDYEDFKYCWENFVYNDNEPFKPWKGLKTNFRLLKRRLRESLQ

SEQ ID NO: 219 - protein, 386 aa, Homo sapiens
MNPQIRNPMERMYRDTFYDNFENEPILYGRSYTWLCYEVKIKRGRSNLLWDTGVFRGPVLPKRQSNHRQEVYFRFENHAEMCFLSWFCGNRLPANRRFQITWFVSWNPCLPCVVKVTKFLAEHPNVTLTISAARLYYYRDRDWRWVLLRLHKAGARVKIMDYEDFAYCWENFVCNEGQPFMPWYKFDDNYASLHRTLKEILRNPMEAMYPHIFYFHFKNLLKACGRNESWLCFTMEVTKHHSAVFRKRGVFRNQVDPETHCHAERCFLSWFCDDILSPNTNYEVTWYTSWSPCPECAGEVAEFLARHSNVNLTIFTARLCYFWDTDYQEGLCSLSQEGASVKIMGYKDFVSCWKNFVYSDDEPFKPWKGLQTNFRLLKRRLREILQ

SEQ ID NO: 220 - protein, 373 aa, Homo sapiens
MKPHFRNTVERMYRDTFSYNFYNRPILSRRNTVWLCYEVKTKGPSRPRLDAKIFRGQVYSQPEHHAEMCFLSWFCGNQLPAYKCFQITWFVSWTPCPDCVAKLAEFLAEHPNVTLTISAARLYYYWERDYRRALCRLSQAGARVKIMDDEEFAYCWENFVYSEGQPFMPWYKFDDNYAFLHRTLKEILRNPMEAMYPHIFYFHFKNLRKAYGRNESWLCFTMEVVKHHSPVSWKRGVFRNQVDPETHCHAERCFLSWFCDDILSPNTNYEVTWYTSWSPCPECAGEVAEFLARHSNVNLTIFTARLYYFWDTDYQEGLRSLSQEGASVEIMGYKDFKYCWENFVYNDDEPFKPWKGLKYNFLFLDSKLQEILE

SEQ ID NO: 221 - protein, 384 aa, Homo sapiens
MKPHFRNTVERMYRDTFSYNFYNRPILSRRNTVWLCYEVKTKGPSRPPLDAKIFRGQVYSELKYHPEMRFFHWFSKWRKLHRDQEYEVTWYISWSPCTKCTRDMATFLAEDPKVTLTIFVARLYYFWDPDYQEALRSLCQKRDGPRATMKIMNYDEFQHCWSKFVYSQRELFEPWNNLPKYYILLHIMLGEILRHSMDPPTFTFNFNNEPWVRGRHETYLCYEVERMHNDTWVLLNQRRGFLCNQAPHKHGFLEGRHAELCFLDVIPFWKLDLDQDYRVTCFTSWSPCFSCAQEMAKFISKNKHVSLCIFTARIYDDQGRCQEGLRTLAEAGAKISIMTYSEFKHCWDTFVDHQGCPFQPWDGLDEHSQDLSGRLRAILQNQEN

SEQ ID NO: 222 - protein, 367 aa, Homo sapiens
MEPIYEEYLANHGTIVKPYYWLSFSLDCSNCPYHIRTGEEARVSLTEFCQIFGFPYGTTFPQTKHLTFYELKTSSGSLVQKGHASSCTGNYIHPESMLFEMNGYLDSAIYNNDSIRHIILYSNNSPCNEANHCCISKMYNFLITYPGITLSIYFSQLYHTEMDFPASAWNREALRSLASLWPRVVLSPISGGIWHSVLHSFISGVSGSHVFQPILTGRALADRHNAYEINAITGVKPYFTDVLLQTKRNPNTKAQEALESYPLNNAFPGQFFQMPSGQLQPNLPPDLRAPVVFVLVPLRDLPPMHMGQNPNKPRNIVRHLNMPQMSFQETKDLGRLPTGRSVEIVEITEQFASSKEADEKKKKKGKK

SEQ ID NO: 223 - protein, 198 aa, Mus musculus
MDSLLMKQKKFLYHFKNVRWAKGRHETYLCYVVKRRDSATSCSLDFGHLRNKSGCHVELLFLRYISDWDLDPGRCYRVTWFTSWSPCYDCARHVAEFLRWNPNLSLRIFTARLYFCEDRKAEPEGLRRLHRAGVQIGIMTFKDYFYCWNTFVENRERTFKAWEGLHENSVRLTRQLRRILLPLYEVDDLRDAFRMLGF

SEQ ID NO: 224 - protein, 388 aa, Rattus norvegicus
MEPLYEEYLTHSGTIVKPYYWLSVSLNCTNCPYHIRTGEEARVPYTEFHQTFGFPWSTYPQTKHLTFYELRSSSGNLIQKGLASNCTGSHTHPESMLFERDGYLDSLIFHDSNIRHIILYSNNSPCDEANHCCISKMYNFLMNYPEVTLSVFFSQLYHTENQFPTSAWNREALRGLASLWPQVTLSAISGGIWQSILETFVSGISEGLTAVRPFTAGRTLTDRYNAYEINCITEVKPYFTDALHSWQKENQDQKVWAASENQPLHNTTPAQWQPDMSQDCRTPAVFMLVPYRDLPPIHVNPSPQKPRTVVRHLNTLQLSASKVKALRKSPSGRPVKKEEARKGSTRSQEANETNKSKWKKQTLFIKSNICHLLEREQKKIGILSSWSV

SEQ ID NO: 225 - protein, 363 aa, Macaca fascicularis
MEPTYEEYLANHGTIVKPYYWLSFSLDCSNCPYHIRTGEEARVSLTEFCQIFGFPYGTTYPQTKHLTFYELKTSSGSLVQKGHASSCTGNYIHPESMLFEMNGYLDSAIYNNDSIRHIILYCNNSPCNEANHCCISKVYNFLITYPGITLSIYFSQLYHTEMDFPASAWNREALRSLASLWPRVVLSPISGGIWHSVLHSFVSGVSGSHVFQPILTGRALTDRYNAYEINAITGVKPFFTDVLLHTKRNPNTKAQMALESYPLNNAFPGQSFQMTSGIPPDLRAPVVFVLLPLRDLPPMHMGQDPNKPRNIIRHLNMPQMSFQETKDLERLPTRRSVETVEITERFASSKQAEEKTKKKKGKK

SEQ ID NO: 226 - protein, 198 aa, Homo sapiens [sequence omitted]

SEQ ID NO: 227 - protein, 198 aa, Canis lupus
MDSLLMKQRKFLYHFKNVRWAKGRHETYLCYVVKRRDSATSFSLDFGHLRNKSGCHVELLFLRYISDWDLDPGRCYRVTWFTSWSPCYDCARHVADFLRGYPNLSLRIFAARLYFCEDRKAEPEGLRRLHRAGVQIAIMTFKDYFYCWNTFVENREKTFKAWEGLHENSVRLSRQLRRILLPLYEVDDLRDAFRTLGL

SEQ ID NO: 228 - protein, 199 aa, Bos taurus
MDSLLKKQRQFLYQFKNVRWAKGRHETYLCYVVKRRDSPTSFSLDFGHLRNKAGCHVELLFLRYISDWDLDPGRCYRVTWFTSWSPCYDCARHVADFLRGYPNLSLRIFTARLYFCDKERKAEPEGLRRLHRAGVQIAIMTFKDYFYCWNTFVENHERTFKAWEGLHENSVRLSRQLRRILLPLYEVDDLRDAFRTLGL

SEQ ID NO: 229 - protein, 198 aa, Mus musculus [sequence omitted]

SEQ ID NO: 230 - protein, 224 aa, Petromyzon marinus
MAGYECVRVSEKLDFDTFEFQFENLHYATERHRTYVIFDVKPQSAGGRSRRLWGYIINNPNVCHAELILMSMIDRHLESNPGVYAMTWYMSWSPCANCSSKLNPWLKNLLEEQGHTLTMHFSRIYDRDREGDHRGLRGLKHVSNSFRMGVVGRAEVKECLAEYVEASRRTLTWLDTTESMAAKMRRKLFCILVRCAGMRESGIPLHLFTLQTPLLSGRVVWWRV

SEQ ID NO: 231 - protein, 331 aa, Petromyzon marinus
MELREVVDCALASCVRHEPLSRVAFLRCFAAPSQKPRGTVILFYVEGAGRGVTGGHAVNYNKQGTSIHAEVLLLSAVRAALLRRRRCEDGEEATRGCTLHCYSTYSPCRDCVEYIQEFGASTGVRVVIHCCRLYELDVNRRRSEAEGVLRSLSRLGRDFRLMGPRDAIALLLGGRLANTADGESGASGNAWVTETNVVEPLVDMTGFGDEDLHAQVQRNKQIREAYANYASAVSLMLGELHVDPDKFPFLAEFLAQTSVEPSGTPRETRGRPRGASSRGPEIGRQRPADFERALGAYGLFLHPRIVSREADREEIKRDLIVVMRKHNYQGP

SEQ ID NO: 232 - protein, 209 aa, Petromyzon marinus
MAGDENVRVSEKLDFDTFEFQFENLHYATERHRTYVIFDVKPQSAGGRSRRLWGYIINNPNVCHAELILMSMIDRHLESNPGVYAMTWYMSWSPCANCSSKLNPWLKNLLEEQGHTLMMHFSRIYDRDREGDHRGLRGLKHVSNSFRMGVVGRAEVKECLAEYVEASRRTLTWLDTTESMAAKMRRKLFCILVRCAGMRESGMPLHLFT

SEQ ID NO: 233 - protein, 158 aa, Saccharomyces cerevisiae
MVTGGMASKWDQKGMDIAYEEAALGYKEGGVPIGGCLINNKDGSVLGRGHNMRFQKGSATLHGEISTLENCGRLEGKVYKDTTLYTTLSPCDMCTGAIIMYGIPRCVVGENVNFKSKGEKYLQTRGHEVVVVDDERCKKIMKQFIDERPQDWFEDIGE

SEQ ID NO: 234 - protein, 218 aa, Artificial Sequence
  Description of Artificial Sequence: Synthetic polypeptide
MSSETGPVAVDPTLRRRIEPHEFEVFFDPRELRKETCLLYEINWGGRHSIWRHTSQNTNKHVEVNFIEKFTTERYFCPNTRCSITWFLSWSPCGECSRAITEFLSRYPHVTLFIYIARLYHHADPRNRQGLRDLISSGVTIQIMTEQESGYCWRNFVNYSPSNEAHWPRYPHLWVRGLPPCLNILRRKQPQLTFFTIALQSCHYQRLPPHILWATGLK

SEQ ID NO: 235 - protein, 218 aa, Artificial Sequence
  Description of Artificial Sequence: Synthetic polypeptide
MSSETGPVAVDPTLRRRIEPHEFEVFFDPRELRKETCLLYEINWGGRHSIWRHTSQNTNKHVEVNFIEKFTTERYFCPNTRCSITWFLSWSPCGECSRAITEFLSRYPHVTLFIYIARLYHHADPRNRQGLRDLISSGVTIQIMTEQESGYCWRNFVNYSPSNEAHWPRYPHLWVRLYVLELYCIILGLPPCLNILRRKQPQHYQRLPPHILWATGLK

SEQ ID NO: 236 - protein, 239 aa, Rattus norvegicus
MAVGSKPKAALVGPHWERERIWCFLCSTGLGTQQTGQTSRWLRPAATQDPVSPPRSLLMKQRKFLYHFKNVRWAKGRHETYLCYVVKRRDSATSFSLDFGYLRNKSGCHVELLFLRYISDWDLDPGRCYRVTWFTSWSPCYDCARHVADFLRGNPNLSLRIFTARLTGWGALPAGLMSPARPSDYFYCWNTFVENHERTFKAWEGLHENSVRLSRRLRRILLPLYEVDDLRDAFRTLGL

SEQ ID NO: 237 - protein, 429 aa, Mus musculus
MGPFCLGCSHRKCYSPIRNLISQETFKFHFKNLGYAKGRKDTFLCYEVTRKDCDSPVSLHHGVFKNKDNIHAEICFLYWFHDKVLKVLSPREEFKITWYMSWSPCFECAEQIVRFLATHHNLSLDIFSSRLYNVQDPETQQNLCRLVQEGAQVAAMDLYEFKKCWKKFVDNGGRRFRPWKRLLTNFRYQDSKLQEILRPCYIPVPSSSSSTLSNICLTKGLPETRFCVEGRRMDPLSEEEFYSQFYNQRVKHLCYYHRMKPYLCYQLEQFNGQAPLKGCLLSEKGKQHAEILFLDKIRSMELSQVTITCYLTWSPCPNCAWQLAAFKRDRPDLILHIYTSRLYFHWKRPFQKGLCSLWQSGILVDVMDLPQFTDCWTNFVNPKRPFWPWKGLEIISRRTQRRLRRIKESWGLQDLVNDFGNLQLGPPMS

SEQ ID NO: 238 - protein, 430 aa, Rattus norvegicus
MGPFCLGCSHRKCYSPIRNLISQETFKFHFKNRLRYAIDRKDTFLCYEVTRKDCDSPVSLHHGVFKNKDNIHAEICFLYWFHDKVLKVLSPREEFKITWYMSWSPCFECAEQVLRFLATHHNLSLDIFSSRLYNIRDPENQQNLCRLVQEGAQVAAMDLYEFKKCWKKFVDNGGRRFRPWKKLLTNFRYQDSKLQEILRPCYIPVPSSSSSTLSNICLTKGLPETRFCVERRRVHLLSEEEFYSQFYNQRVKHLCYYHGVKPYLCYQLEQFNGQAPLKGCLLSEKGKQHAEILFLDKIRSMELSQVIITCYLTWSPCPNCAWQLAAFKRDRPDLILHIYTSRLYFHWKRPFQKGLCSLWQSGILVDVMDLPQFTDCWTNFVNPKRPFWPWKGLEIISRRTQRRLHRIKESWGLQDLVNDFGNLQLGPPMS

SEQ ID NO: 239 - protein, 370 aa, Macaca mulatta
MVEPMDPRTFVSNFNNRPILSGLNTVWLCCEVKTKDPSGPPLDAKIFQGKVYSKAKYHPEMRFLRWFHKWRQLHHDQEYKVTWYVSWSPCTRCANSVATFLAKDPKVTLTIFVARLYYFWKPDYQQALRILCQKRGGPHATMKIMNYNEFQDCWNKFVDGRGKPFKPRNNLPKHYTLLQATLGELLRHLMDPGTFTSNFNNKPWVSGQHETYLCYKVERLHNDTWVPLNQHRGFLRNQAPNIHGFPKGRHAELCFLDLIPFWKLDGQQYRVTCFTSWSPCFSCAQEMAKFISNNEHVSLCIFAARIYDDQGRYQEGLRALHRDGAKIAMMNYSEFEYCWDTFVDRQGRPFQPWDGLDEHSQALSGRLRAI

SEQ ID NO: 240 - protein, 384 aa, Pan troglodytes
MKPHFRNPVERMYQDTFSDNFYNRPILSHRNTVWLCYEVKTKGPSRPPLDAKIFRGQVYSKLKYHPEMRFFHWFSKWRKLHRDQEYEVTWYISWSPCTKCTRDVATFLAEDPKVTLTIFVARLYYFWDPDYQEALRSLCQKRDGPRATMKIMNYDEFQHCWSKFVYSQRELFEPWNNLPKYYILLHIMLGEILRHSMDPPTFTSNFNNELWVRGRHETYLCYEVERLHNDTWVLLNQRRGFLCNQAPHKHGFLEGRHAELCFLDVIPFWKLDLHQDYRVTCFTSWSPCFSCAQEMAKFISNNKHVSLCIFAARIYDDQGRCQEGLRTLAKAGAKISIMTYSEFKHCWDTFVDHQGCPFQPWDGLEEHSQALSGRLRAILQNQGN

SEQ ID NO: 241 - protein, 377 aa, Chlorocebus sabaeus
MNPQIRNMVEQMEPDIFVYYFNNRPILSGRNTVWLCYEVKTKDPSGPPLDANIFQGKLYPEAKDHPEMKFLHWFRKWRQLHRDQEYEVTWYVSWSPCTRCANSVATFLAEDPKVTLTIFVARLYYFWKPDYQQALRILCQERGGPHATMKIMNYNEFQHCWNEFVDGQGKPFKPRKNLPKHYTLLHATLGELLRHVMDPGTFTSNFNNKPWVSGQRETYLCYKVERSHNDTWVLLNQHRGFLRNQAPDRHGFPKGRHAELCFLDLIPFWKLDDQQYRVTCFTSWSPCFSCAQKMAKFISNNKHVSLCIFAARIYDDQGRCQEGLRTLHRDGAKIAVMNYSEFEYCWDTFVDRQGRPFQPWDGLDEHSQALSGRLRAI

SEQ ID NO: 242 - protein, 395 aa, Rattus norvegicus
MQPQGLGPNAGMGPVCLGCSHRRPYSPIRNPLKKLYQQTFYFHFKNVRYAWGRKNNFLCYEVNGMDCALPVPLRQGVFRKQGHIHAELCFIYWFHDKVLRVLSPMEEFKVTWYMSWSPCSKCAEQVARFLAAHRNLSLAIFSSRLYYYLRNPNYQQKLCRLIQEGVHVAAMDLPEFKKCWNKFVDNDGQPFRPWMRLRINFSFYDCKLQEIFSRMNLLREDVFYLQFNNSHRVKPVQNRYYRRKSYLCYQLERANGQEPLKGYLLYKKGEQHVEILFLEKMRSMELSQVRITCYLTWSPCPNCARQLAAFKKDHPDLILRIYTSRLYFWRKKFQKGLCTLWRSGIHVDVMDLPQFADCWTNFVNPQRPFRPWNELEKNSWRIQRRLRRIKESWGL

SEQ ID NO: 243 - protein, 226 aa, Bos taurus
DGWEVAFRSGTVLKAGVLGVSMTEGWAGSGHPGQGACVWTPGTRNTMNLLREVLFKQQFGNQPRVPAPYYRRKTYLCYQLKQRNDLTLDRGCFRNKKQRHAERFIDKINSLDLNPSQSYKIICYITWSPCPNCANELVNFITRNNHLKLEIFASRLYFHWIKSFKMGLQDLQNAGISVAVMTHTEFEDCWEQFVDNQSRPFQPWDKLEQYSASIRRRLQRILTAPI

SEQ ID NO: 244 - protein, 490 aa, Pan troglodytes
MNPQIRNPMEWMYQRTFYYNFENEPILYGRSYTWLCYEVKIRRGHSNLLWDTGVFRGQMYSQPEHHAEMCFLSWFCGNQLSAYKCFQITWFVSWTPCPDCVAKLAKFLAEHPNVTLTISAARLYYYWERDYRRALCRLSQAGARVKIMDDEEFAYCWENFVYNEGQPFMPWYKFDDNYAFLHRTLKEIIRHLMDPDTFTFNFNNDPLVLRRHQTYLCYEVERLDNGTWVLMDQHMGFLCNEAKNLLCGFYGRHAELRFLDLVPSLQLDPAQIYRVTWFISWSPCFSWGCAGQVRAFLQENTHVRLRIFAARIYDYDPLYKEALQMLRDAGAQVSIMTYDEFEYCWDTFVYRQGCPFQPWDGLEEHSQALSGRLRAILQVRASSLCMVPHRPPPPPQSPGPCLPLCSEPPLGSLLPTGRPAPSLPFLLTASFSFPPPASLPPLPSLSLSPGHLPVPSFHSLTSCSIQPPCSSRIRETEGWASVSKEGRDLG

SEQ ID NO: 245 - protein, 190 aa, Gorilla gorilla
MNPQIRNPMKAMYPGTFYFQFKNLWEANDRNETWLCFTVEGIKRRSVVSWKTGVFRNQVDSETHCHAERCFLSWECDDILSPNTNYQVTWYTSWSPCPECAGEVAEFLARHSNVNLTIFTARLYYFQDTDYQEGLRSLSQEGVAVKIMDYKDFKYCWENFVYNDDEPFKPWKGLKYNFRFLKRRLQEILE

SEQ ID NO: 246 - protein, 202 aa, Macaca mulatta
MDGSPASRPRHLMDPNTFTFNFNNDLSVRGRHQTYLCYEVERLDNGTWVPMDERRGFLCNKAKNVPCGDYGCHVELRFLCEVPSWQLDPAQTYRVTWFISWSPCFRRGCAGQVRVFLQENKHVRLRIFAARIYDYDPLYQEALRTLRDAGAQVSIMTYEEFKHCWDTFVDRQGRPFQPWDGLDEHSQALSGRLRAILQNQGN

SEQ ID NO: 247 - protein, 185 aa, Bos taurus
MDEYTFTENFNNQGWPSKTYLCYEMERLDGDATIPLDEYKGFVRNKGLDQPEKPCHAELYFLGKIHSWNLDRNQHYRLTCFISWSPCYDCAQKLTTFLKENHHISLHILASRIYTHNRFGCHQSGLCELQAAGARITIMTFEDFKHCWETFVDHKGKPFQPWEGLNVKSQALCTELQAILKTQQN

SEQ ID NO: 248 - protein, 200 aa, Homo sapiens
MALLTAETFRLQFNNKRRLRRPYYPRKALLCYQLTPQNGSTPTRGYFENKKKCHAEICFINEIKSMGLDETQCYQVTCYLTWSPCSSCAWELVDFIKAHDHLNLGIFASRLYYHWCKPQQKGLRLLCGSQVPVEVMGFPKFADCWENFVDHEKPLSFNPYKMLEELDKNSRAIKRRLERIKIPGVRAQGRYMDILCDAEV

SEQ ID NO: 249 - protein, 210 aa, Macaca mulatta
MALLTAKTFSLQFNNKRRVNKPYYPRKALLCYQLTPQNGSTPTRGHLKNKKKDHAEIRFINKIKSMGLDETQCYQVTCYLTWSPCPSCAGELVDFIKAHRHLNLRIFASRLYYHWRPNYQEGLLLLCGSQVPVEVMGLPEFTDCWENFVDHKEPPSFNPSEKLEELDKNSQAIKRRLERIKSRSVDVLENGLRSLQLGPVTPSSSIRNSR

SEQ ID NO: 250 - protein, 224 aa, Rattus norvegicus
MAQKEEAAEAAAPASQNGDDLENLEDPEKLKELIDLPPFEIVTGVRLPVNFFKFQFRNVEYSSGRNKTFLCYVVEAQSKGGQVQATQGYLEDEHAGAHAEEAFFNTILPAFDPALKYNVTWYVSSSPCAACADRILKTLSKTKNLRLLILVSRLFMWEEPEVQAALKKLKEAGCKLRIMKPQDFEYLWQNFVEQEEGESKAFEPWEDIQENFLYYEEKLADILK

SEQ ID NO: 251 - protein, 208 aa, Petromyzon marinus
MTDAEYVRIHEKLDIYTFKKQFFNNKKSVSHRCYVLFELKRRGERRACFWGYAVNKPQSGTERGIHAEIFSIRKVEEYLRDNPGQFTINWYSSWSPCADCAEKILEWYNQELRGNGHTLKIWACKLYYEKNARNQIGLWNLRDNGVGLNVMVSEHYQCCRKIFIQSSHNQLNENRWLEKTLKRAEKRRSELSFMIQVKILHTTKSPAV

SEQ ID NO: 252 - protein, 182 aa, Homo sapiens
MDPPTFTFNFNNEPWWGRHETYLCYEVERMHNDTWVLLNQRRGFLCNQAPHKHGFLEGRHAELCFLDVIPFWKLDLDQDYRVTCFTSWSPCFSCAQEMAKFISKNKHVSLCIFTARIYDDQGRCQEGLRTLAEAGAKISFTYSEFKHCWDTFVDHQGCPFQPWDGLDEHSQDLSGRLRAILQ

SEQ ID NO: 253 - protein, 8 aa, Artificial Sequence
  Description of Artificial Sequence: Synthetic peptide
SGGSSGGS

SEQ ID NO: 254 - protein, 1609 aa, Artificial Sequence
  Description of Artificial Sequence: Synthetic polypeptide
MSEVEFSHEYWMRHALTLAKRARDEREVPVGAVLVLNNRVIGEGWNRAIGLHDPTAHAEIMALRQGGLVMQNYRLIDATLYVTFEPCVMCAGAMIHSRIGRVVFGVRNAKTGAAGSLMDVLHYPGMNHRVEITEGILADECAALLCTFFRMPRQVFNAQKKAQSSTDSGGSSGGSSGSETPGTSESATPESSGGSSGGSEIGKATAKYFFYSNIMNFFKTEITLANGEIRKRPLIETNGETGEIVWDKGRDFATVRKVLSMPQVNIVKKTEVQTGGFSKESILPKRNSDKLIARKKDWDPKKYGGFMQPTVAYSVLVVAKVEKGKSKKLKSVKELLGITIMERSSFEKNPIDFLEAKGYKEVKKDLIIKLPKYSLFELENGRKRMLASAKFLQKGNELALPSKYVNFLYLASHYEKLKGSPEDNEQKQLFVEQHKHYLDEIIEQISEFSKRVILADANLDKVLSAYNKHRDKPIREQAENIIHLFTLTNLGAPRAFKYFDTTIARKEYRSTKEVLDATLIHQSITGLYETRIDLSQLGGDGGSGGSGGSGGSGGSGGSGGMDKKYSIGLAIGTNSVGWAVITDEYKVPSKKFKVLGNTDRHSIKKNLIGALLFDSGETAEATRLKRTARRRYTRRKNRICYLQEIFSNEMAKVDDSFFHRLEESFLVEEDKKHERHPIFGNIVDEVAYHEKYPTIYHLRKKLVDSTDKADLRLIYLALAHMIKFRGHFLIEGDLNPDNSDVDKLFIQLVQTYNQLFEENPINASGVDAKAILSARLSKSRRLENLIAQLPGEKKNGLFGNLIALSLGLTPNFKSNFDLAEDAKLQLSKDTYDDDLDNLLAQIGDQYADLFLAAKNLSDAILLSDILRVNTEITKAPLSASMIKRYDEHHQDLTLLKALVRQQLPEKYKEIFFDQSKNGYAGYIDGGASQEEFYKFIKPILEKMDGTEELLVKLNREDLLRKQRTFDNGSIPHQIHLGELHAILRRQEDFYPFLKDNREKIEKILTFRIPYYVGPLARGNSRFAWMTRKSEETITPWNFEEVVDKGASAQSFIERMTNFDKNLPNEKVLPKHSLLYEYFTVYNELTKVKYVTEGMRKPAFLSGEQKKAIVDLLFKTNRKVTVKQLKEDYFKKIECFDSVEISGVEDRFNASLGTYHDLLKIIKDKDFLDNEENEDILEDIVLTLTLFEDREMIEERLKTYAHLFDDKVMKQLKRRRYTGWGRLSRKLINGIRDKQSGKTILDFLKSDGFANRNFMQLIHDDSLTFKEDIQKAQVSGQGDSLHEHIANLAGSPAIKKGILQTVKVVDELVKVMGRHKPENIVIEMARENQTTQKGQKNSRERMKRIEEGIKELGSQILKEHPVENTQLQNEKLYLYYLQNGRDMYVDQELDINRLSDYDVDHIVPQSFLKDDSIDNKVLTRSDKNRGKSDNVPSEEVVKKMKNYWRQLLNAKLITQRKFDNLTKAERGGLSELDKAGFIKRQLVETRQITKHVAQILDSRMNTKYDENDKLIREVKVITLKSKLVSDFRKDFQFYKVREINNYHHAHDAYLNAVVGTALIKKYPKLESEFVYGDYKVYDVRKMIAKSEQEGADKRTADGSEFESPKKKRKV

SEQ ID NO: 255 - protein, 1807 aa, Artificial Sequence
  Description of Artificial Sequence: Synthetic polypeptide
MSEVEFSHEYWMRHALTLAKRAWDEREVPVGAVLVHNNRVIGEGWNRPIGRHDPTAHAEIMALRQGGLVMQNYRLIDATLYVTLEPCVMCAGAMIHSRIGRVVFGARDAKTGAAGSLMDVLHHPGMNHRVEITEGILADECAALLSDFFRMRRQEIKAQKKAQSSTDGGSSGGSSGSETPGTSESATPESSGGSSGGSMSEVEFSHEYWMRHALTLAKRARDEREVPVGAVLVLNNRVIGEGWNRAIGLHDPTAHAEIMALRQGGLVMQNYRLIDATLYVTFEPCVMCAGAMIHSRIGRVVFGVRNAKTGAAGSLMDVLHYPGMNHRVEITEGILADECAALLCTFFRMPRQVFNAQKKAQSSTDSGGSSGGSSGSETPGTSESATPESSGGSSGGSEIGKATAKYFFYSNIMNFFKTEITLANGEIRKRPLIETNGETGEIVWDKGRDFATVRKVLSMPQVNIVKKTEVQTGGFSKESILPKRNSDKLIARKKDWDPKKYGGFMQPTVAYSVLVVAKVEKGKSKKLKSVKELLGITIMERSSFEKNPIDFLEAKGYKEVKKDLIIKLPKYSLFELENGRKRMLASAKFLQKGNELALPSKYVNFLYLASHYEKLKGSPEDNEQKQLFVEQHKHYLDEIIEQISEFSKRVILADANLDKVLSAYNKHRDKPIREQAENIIHLFTLTNLGAPRAFKYFDTTIARKEYRSTKEVLDATLIHQSITGLYETRIDLSQLGGDGGSGGSGGSGGSGGSGGSGGMDKKYSIGLAIGTNSVGWAVITDEYKVPSKKFKVLGNTDRHSIKKNLIGALLFDSGETAEATRLKRTARRRYTRRKNRICYLQEIFSNEMAKVDDSFFHRLEESFLVEEDKKHERHPIFGNIVDEVAYHEKYPTIYHLRKKLVDSTDKADLRLIYLALAHMIKFRGHFLIEGDLNPDNSDVDKLFIQLVQTYNQLFEENPINASGVDAKAILSARLSKSRRLENLIAQLPGEKKNGLFGNLIALSLGLTPNFKSNFDLAEDAKLQLSKDTYDDDLDNLLAQIGDQYADLFLAAKNLSDAILLSDILRVNTEITKAPLSASMIKRYDEHHQDLTLLKALVRQQLPEKYKEIFFDQSKNGYAGYIDGGASQEEFYKFIKPILEKMDGTEELLVKLNREDLLRKQRTFDNGSIPHQIHLGELHAILRRQEDFYPFLKDNREKIEKILTFRIPYYVGPLARGNSRFAWMTRKSEETITPWNFEEVVDKGASAQSFIERMTNFDKNLPNEKVLPKHSLLYEYFTVYNELTKVKYVTEGMRKPAFLSGEQKKAIVDLLFKTNRKVTVKQLKEDYFKKIECFDSVEISGVEDRFNASLGTYHDLLKIIKDKDFLDNEENEDILEDIVLTLTLFEDREMIEERLKTYAHLFDDKVMKQLKRRRYTGWGRLSRKLINGIRDKQSGKTILDFLKSDGFANRNFMQLIHDDSLTFKEDIQKAQVSGQGDSLHEHIANLAGSPAIKKGILQTVKVVDELVKVMGRHKPENIVIEMARENQTTQKGQKNSRERMKRIEEGIKELGSQILKEHPVENTQLQNEKLYLYYLQNGRDMYVDQELDINRLSDYDVDHIVPQSFLKDDSIDNKVLTRSDKNRGKSDNVPSEEVVKKMKNYWRQLLNAKLITQRKFDNLTKAERGGLSELDKAGFIKRQLVETRQITKHVAQILDSRMNTKYDENDKLIREVKVITLKSKLVSDFRKDFQFYKVREINNYHHAHDAYLNAVVGTALIKKYPKLESEFVYGDYKVYDVRKMIAKSEQEGADKRTADGSEFESPKKKRKV

SEQ ID NO: 256 - protein, 1588 aa, Artificial Sequence
  Description of Artificial Sequence: Synthetic polypeptide
MSEVEFSHEYWMRHALTLAKRARDEREVPVGAVLVLNNRVIGEGWNRAIGLHDPTAHAEIMALRQGGLVMQNYRLIDATLYVTFEPCVMCAGAMIHSRIGRVVFGVRNAKTGAAGSLMDVLHHPGMNHRVEITEGILADECAALLCRFFRMPRRVFNAQKKAQSSTDSGGSSGGSSGSETPGTSESATPESSGGSSGGSDKKYSIGLAIGTNSVGWAVITDEYKVPSKKFKVLGNTDRHSIKKNLIGALLFDSGETAEATRLKRTARRRYTRRKNRICYLQEIFSNEMAKVDDSFFHRLEESFLVEEDKKHERHPIFGNIVDEVAYHEKYPTIYHLRKKLVDSTDKADLRLIYLALAHMIKFRGHFLIEGDLNPDNSDVDKLFIQLVQTYNQLFEENPINASGVDAKAILSARLSKSRRLENLIAQLPGEKKNGLFGNLIALSLGLTPNFKSNFDLAEDAKLQLSKDTYDDDLDNLLAQIGDQYADLFLAAKNLSDAILLSDILRVNTEITKAPLSASMIKRYDEHHQDLTLLKALVRQQLPEKYKEIFFDQSKNGYAGYIDGGASQEEFYKFIKPILEKMDGTEELLVKLNREDLLRKQRTFDNGSIPHQIHLGELHAILRRQEDFYPFLKDNREKIEKILTFRIPYYVGPLARGNSRFAWMTRKSEETITPWNFEEVVDKGASAQSFIERMTNFDKNLPNEKVLPKHSLLYEYFTVYNELTKVKYVTEGMRKPAFLSGEQKKAIVDLLFKTNRKVTVKQLKEDYFKKIECFDSVEISGVEDRFNASLGTYHDLLKIIKDKDFLDNEENEDILEDIVLTLTLFEDREMIEERLKTYAHLFDDKVMKQLKRRRYTGWGRLSRKLINGIRDKQSGKTILDFLKSDGFANRNFMQLIHDDSLTFKEDIQKAQVSGQGDSLHEHIANLAGSPAIKKGILQTVKVVDELVKVMGRHKPENIVIEMARENQTTQKGQKNSRERMKRIEEGIKELGSQILKEHPVENTQLQNEKLYLYYLQNGRDMYVDQELDINRLSDYDVDHIVPQSFLKDDSIDNKVLTRSDKNRGKSDNVPSEEVVKKMKNYWRQLLNAKLITQRKFDNLTKAERGGLSELDKAGFIKRQLVETRQITKHVAQILDSRMNTKYDENDKLIREVKVITLKSKLVSDFRKDFQFYKVREINNYHHAHDAYLNAVVGTALIKKYPKLESEFVYGDYKVYDVRKMIAKSEQEIGKATAKYFFYSNIMNFFKTEITLANGEIRKRPLIETNGETGEIVWDKGRDFATVRKVLSMPQVNIVKKTEVQTGGFSKESILPKRNSDKLIARKKDWDPKKYGGFDSPTVAYSVLVVAKVEKGKSKKLKSVKELLGITIMERSSFEKNPIDFLEAKGYKEVKKDLIIKLPKYSLFELENGRKRMLASAGELQKGNELALPSKYVNFLYLASHYEKLKGSPEDNEQKQLFVEQHKHYLDEIIEQISEFSKRVILADANLDKVLSAYNKHRDKPIREQAENIIHLFTLTNLGAPAAFKYFDTTIDRKRYTSTKEVLDATLIHQSITGLYETRIDLSQLGGDEGADKRTADGSEFESPKKKRKV

SEQ ID NO: 257 - protein, 1786 aa, Artificial Sequence
  Description of Artificial Sequence: Synthetic polypeptide
MSEVEFSHEYWMRHALTLAKRAWDEREVPVGAVLVHNNRVIGEGWNRPIGRHDPTAHAEIMALRQGGLVMQNYRLIDATLYVTLEPCVMCAGAMIHSRIGRVVFGARDAKTGAAGSLMDVLHHPGMNHRVEITEGILADECAALLSDFFRMRRQEIKAQKKAQSSTDSGGSSGGSSGSETPGTSESATPESSGGSSGGSSEVEFSHEYWMRHALTLAKRARDEREVPVGAVLVLNNRVIGEGWNRAIGLHDPTAHAEIMALRQGGLVMQNYRLIDATLYVTFEPCVMCAGAMIHSRIGRVVFGVRNAKTGAAGSLMDVLHHPGMNHRVEITEGILADECAALLCRFFRMPRRVFNAQKKAQSSTDSGGSSGGSSGSETPGTSESATPESSGGSSGGSDKKYSIGLAIGTNSVGWAVITDEYKVPSKKFKVLGNTDRHSIKKNLIGALLFDSGETAEATRLKRTARRRYTRRKNRICYLQEIFSNEMAKVDDSFFHRLEESFLVEEDKKHERHPIFGNIVDEVAYHEKYPTIYHLRKKLVDSTDKADLRLIYLALAHMIKFRGHFLIEGDLNPDNSDVDKLFIQLVQTYNQLFEENPINASGVDAKAILSARLSKSRRLENLIAQLPGEKKNGLFGNLIALSLGLTPNFKSNFDLAEDAKLQLSKDTYDDDLDNLLAQIGDQYADLFLAAKNLSDAILLSDILRVNTEITKAPLSASMIKRYDEHHQDLTLLKALVRQQLPEKYKEIFFDQSKNGYAGYIDGGASQEEFYKFIKPILEKMDGTEELLVKLNREDLLRKQRTFDNGSIPHQIHLGELHAILRRQEDFYPFLKDNREKIEKILTFRIPYYVGPLARGNSRFAWMTRKSEETITPWNFEEVVDKGASAQSFIERMTNFDKNLPNEKVLPKHSLLYEYFTVYNELTKVKYVTEGMRKPAFLSGEQKKAIVDLLFKTNRKVTVKQLKEDYFKKIECFDSVEISGVEDRFNASLGTYHDLLKIIKDKDFLDNEENEDILEDIVLTLTLFEDREMIEERLKTYAHLFDDKVMKQLKRRRYTGWGRLSRKLINGIRDKQSGKTILDFLKSDGFANRNFMQLIHDDSLTFKEDIQKAQVSGQGDSLHEHIANLAGSPAIKKGILQTVKVVDELVKVMGRHKPENIVIEMARENQTTQKGQKNSRERMKRIEEGIKELGSQILKEHPVENTQLQNEKLYLYYLQNGRDMYVDQELDINRLSDYDVDHIVPQSFLKDDSIDNKVLTRSDKNRGKSDNVPSEEVVKKMKNYWRQLLNAKLITQRKFDNLTKAERGGLSELDKAGFIKRQLVETRQITKHVAQILDSRMNTKYDENDKLIREVKVITLKSKLVSDFRKDFQFYKVREINNYHHAHDAYLNAVVGTALIKKYPKLESEFVYGDYKVYDVRKMIAKSEQEIGKATAKYFFYSNIMNFFKTEITLANGEIRKRPLIETNGETGEIVWDKGRDFATVRKVLSMPQVNIVKKTEVQTGGFSKESILPKRNSDKLIARKKDWDPKKYGGFDSPTVAYSVLVVAKVEKGKSKKLKSVKELLGITIMERSSFEKNPIDFLEAKGYKEVKKDLIIKLPKYSLFELENGRKRMLASAGELQKGNELALPSKYVNFLYLASHYEKLKGSPEDNEQKQLFVEQHKHYLDEIIEQISEFSKRVILADANLDKVLSAYNKHRDKPIREQAENIIHLFTLTNLGAPAAFKYFDTTIDRKRYTSTKEVLDATLIHQSITGLYETRIDLSQLGGDEGADKRTADGSEFESPKKKRKV

SEQ ID NO: 258 - protein, 1588 aa, Artificial Sequence
  Description of Artificial Sequence: Synthetic polypeptide
MSEVEFSHEYWMRHALTLAKRARDEREVPVGAVLVLNNRVIGEGWNRAIGLHDPTAHAEIMALRQGGLVMQNYRLYDATLYVTFEPCVMCAGAMIHSRIGRVVFGVRNAKTGAAGSLMDVLHHPGMNHRVEITEGILADECAALLCRFFRMPRRVFNAQKKAQSSTDSGGSSGGSSGSETPGTSESATPESSGGSSGGSDKKYSIGLAIGTNSVGWAVITDEYKVPSKKFKVLGNTDRHSIKKNLIGALLFDSGETAEATRLKRTARRRYTRRKNRICYLQEIFSNEMAKVDDSFFHRLEESFLVEEDKKHERHPIFGNIVDEVAYHEKYPTIYHLRKKLVDSTDKADLRLIYLALAHMIKFRGHFLIEGDLNPDNSDVDKLFIQLVQTYNQLFEENPINASGVDAKAILSARLSKSRRLENLIAQLPGEKKNGLFGNLIALSLGLTPNFKSNFDLAEDAKLQLSKDTYDDDLDNLLAQIGDQYADLFLAAKNLSDAILLSDILRVNTEITKAPLSASMIKRYDEHHQDLTLLKALVRQQLPEKYKEIFFDQSKNGYAGYIDGGASQEEFYKFIKPILEKMDGTEELLVKLNREDLLRKQRTFDNGSIPHQIHLGELHAILRRQEDFYPFLKDNREKIEKILTFRIPYYVGPLARGNSRFAWMTRKSEETITPWNFEEVVDKGASAQSFIERMTNFDKNLPNEKVLPKHSLLYEYFTVYNELTKVKYVTEGMRKPAFLSGEQKKAIVDLLFKTNRKVTVKQLKEDYFKKIECFDSVEISGVEDRFNASLGTYHDLLKIIKDKDFLDNEENEDILEDIVLTLTLFEDREMIEERLKTYAHLFDDKVMKQLKRRRYTGWGRLSRKLINGIRDKQSGKTILDFLKSDGFANRNFMQLIHDDSLTFKEDIQKAQVSGQGDSLHEHIANLAGSPAIKKGILQTVKVVDELVKVMGRHKPENIVIEMARENQTTQKGQKNSRERMKRIEEGIKELGSQILKEHPVENTQLQNEKLYLYYLQNGRDMYVDQELDINRLSDYDVDHIVPQSFLKDDSIDNKVLTRSDKNRGKSDNVPSEEVVKKMKNYWRQLLNAKLITQRKFDNLTKAERGGLSELDKAGFIKRQLVETRQITKHVAQILDSRMNTKYDENDKLIREVKVITLKSKLVSDFRKDFQFYKVREINNYHHAHDAYLNAVVGTALIKKYPKLESEFVYGDYKVYDVRKMIAKSEQEIGKATAKYFFYSNIMNFFKTEITLANGEIRKRPLIETNGETGEIVWDKGRDFATVRKVLSMPQVNIVKKTEVQTGGFSKESILPKRNSDKLIARKKDWDPKKYGGFDSPTVAYSVLVVAKVEKGKSKKLKSVKELLGITIMERSSFEKNPIDFLEAKGYKEVKKDLIIKLPKYSLFELENGRKRMLASAGELQKGNELALPSKYVNFLYLASHYEKLKGSPEDNEQKQLFVEQHKHYLDEIIEQISEFSKRVILADANLDKVLSAYNKHRDKPIREQAENIIHLFTLTNLGAPAAFKYFDTTIDRKRYTSTKEVLDATLIHQSITGLYETRIDLSQLGGDEGADKRTADGSEFESPKKKRKV

SEQ ID NO: 259 - protein, 1786 aa, Artificial Sequence
  Description of Artificial Sequence: Synthetic polypeptide
MSEVEFSHEYWMRHALTLAKRAWDEREVPVGAVLVHNNRVIGEGWNRPIGRHDPTAHAEIMALRQGGLVMQNYRLIDATLYVTLEPCVMCAGAMIHSRIGRVVFGARDAKTGAAGSLMDVLHHPGMNHRVEITEGILADECAALLSDFFRMRRQEIKAQKKAQSSTDSGGSSGGSSGSETPGTSESATPESSGGSSGGSSEVEFSHEYWMRHALTLAKRARDEREVPVGAVLVLNNRVIGEGWNRAIGLHDPTAHAEIMALRQGGLVMQNYRLYDATLYVTFEPCVMCAGAMIHSRIGRVVFGVRNAKTGAAGSLMDVLHHPGMNHRVEITEGILADECAALLCRFFRMPRRVFNAQKKAQSSTDSGGSSGGSSGSETPGTSESATPESSGGSSGGSDKKYSIGLAIGTNSVGWAVITDEYKVPSKKFKVLGNTDRHSIKKNLIGALLFDSGETAEATRLKRTARRRYTRRKNRICYLQEIFSNEMAKVDDSFFHRLEESFLVEEDKKHERHPIFGNIVDEVAYHEKYPTIYHLRKKLVDSTDKADLRLIYLALAHMIKFRGHFLIEGDLNPDNSDVDKLFIQLVQTYNQLFEENPINASGVDAKAILSARLSKSRRLENLIAQLPGEKKNGLFGNLIALSLGLTPNFKSNFDLAEDAKLQLSKDTYDDDLDNLLAQIGDQYADLFLAAKNLSDAILLSDILRVNTEITKAPLSASMIKRYDEHHQDLTLLKALVRQQLPEKYKEIFFDQSKNGYAGYIDGGASQEEFYKFIKPILEKMDGTEELLVKLNREDLLRKQRTFDNGSIPHQIHLGELHAILRRQEDFYPFLKDNREKIEKILTFRIPYYVGPLARGNSRFAWMTRKSEETITPWNFEEVVDKGASAQSFIERMTNFDKNLPNEKVLPKHSLLYEYFTVYNELTKVKYVTEGMRKPAFLSGEQKKAIVDLLFKTNRKVTVKQLKEDYFKKIECFDSVEISGVEDRFNASLGTYHDLLKIIKDKDFLDNEENEDILEDIVLTLTLFEDREMIEERLKTYAHLFDDKVMKQLKRRRYTGWGRLSRKLINGIRDKQSGKTILDFLKSDGFANRNFMQLIHDDSLTFKEDIQKAQVSGQGDSLHEHIANLAGSPAIKKGILQTVKVVDELVKVMGRHKPENIVIEMARENQTTQKGQKNSRERMKRIEEGIKELGSQILKEHPVENTQLQNEKLYLYYLQNGRDMYVDQELDINRLSDYDVDHIVPQSFLKDDSIDNKVLTRSDKNRGKSDNVPSEEVVKKMKNYWRQLLNAKLITQRKFDNLTKAERGGLSELDKAGFIKRQLVETRQITKHVAQILDSRMNTKYDENDKLIREVKVITLKSKLVSDFRKDFQFYKVREINNYHHAHDAYLNAVVGTALIKKYPKLESEFVYGDYKVYDVRKMIAKSEQEIGKATAKYFFYSNIMNFFKTEITLANGEIRKRPLIETNGETGEIVWDKGRDFATVRKVLSMPQVNIVKKTEVQTGGFSKESILPKRNSDKLIARKKDWDPKKYGGFDSPTVAYSVLVVAKVEKGKSKKLKSVKELLGITIMERSSFEKNPIDFLEAKGYKEVKKDLIIKLPKYSLFELENGRKRMLASAGELQKGNELALPSKYVNFLYLASHYEKLKGSPEDNEQKQLFVEQHKHYLDEIIEQISEFSKRVILADANLDKVLSAYNKHRDKPIREQAENIIHLFTLTNLGAPAAFKYFDTTIDRKRYTSTKEVLDATLIHQSITGLYETRIDLSQLGGDEGADKRTADGSEFESPKKKRKV

SEQ ID NO: 260 - protein, 1588 aa, Artificial Sequence
  Description of Artificial Sequence: Synthetic polypeptide
MSEVEFSHEYWMRHALTLAKRARDEREVPVGAVLVLNNRVIGEGWNRAIGLHDPTAHAEIMALRQGGLVMQNYRLIDATLYSTFEPCVMCAGAMIHSRIGRVVFGVRNAKTGAAGSLMDVLHYPGMNHRVEITEGILADECAALLCYFFRMPRRVFNAQKKAQSSTDSGGSSGGSSGSETPGTSESATPESSGGSSGGSDKKYSIGLAIGTNSVGWAVITDEYKVPSKKFKVLGNTDRHSIKKNLIGALLFDSGETAEATRLKRTARRRYTRRKNRICYLQEIFSNEMAKVDDSFFHRLEESFLVEEDKKHERHPIFGNIVDEVAYHEKYPTIYHLRKKLVDSTDKADLRLIYLALAHMIKFRGHFLIEGDLNPDNSDVDKLFIQLVQTYNQLFEENPINASGVDAKAILSARLSKSRRLENLIAQLPGEKKNGLFGNLIALSLGLTPNFKSNFDLAEDAKLQLSKDTYDDDLDNLLAQIGDQYADLFLAAKNLSDAILLSDILRVNTEITKAPLSASMIKRYDEHHQDLTLLKALVRQQLPEKYKEIFFDQSKNGYAGYIDGGASQEEFYKFIKPILEKMDGTEELLVKLNREDLLRKQRTFDNGSIPHQIHLGELHAILRRQEDFYPFLKDNREKIEKILTFRIPYYVGPLARGNSRFAWMTRKSEETITPWNFEEVVDKGASAQSFIERMTNFDKNLPNEKVLPKHSLLYEYFTVYNELTKVKYVTEGMRKPAFLSGEQKKAIVDLLFKTNRKVTVKQLKEDYFKKIECFDSVEISGVEDRFNASLGTYHDLLKIIKDKDFLDNEENEDILEDIVLTLTLFEDREMIEERLKTYAHLFDDKVMKQLKRRRYTGWGRLSRKLINGIRDKQSGKTILDFLKSDGFANRNFMQLIHDDSLTFKEDIQKAQVSGQGDSLHEHIANLAGSPAIKKGILQTVKVVDELVKVMGRHKPENIVIEMARENQTTQKGQKNSRERMKRIEEGIKELGSQILKEHPVENTQLQNEKLYLYYLQNGRDMYVDQELDINRLSDYDVDHIVPQSFLKDDSIDNKVLTRSDKNRGKSDNVPSEEVVKKMKNYWRQLLNAKLITQRKFDNLTKAERGGLSELDKAGFIKRQLVETRQITKHVAQILDSRMNTKYDENDKLIREVKVITLKSKLVSDFRKDFQFYKVREINNYHHAHDAYLNAVVGTALIKKYPKLESEFVYGDYKVYDVRKMIAKSEQEIGKATAKYFFYSNIMNFFKTEITLANGEIRKRPLIETNGETGEIVWDKGRDFATVRKVLSMPQVNIVKKTEVQTGGFSKESILPKRNSDKLIARKKDWDPKKYGGFDSPTVAYSVLVVAKVEKGKSKKLKSVKELLGITIMERSSFEKNPIDFLEAKGYKEVKKDLIIKLPKYSLFELENGRKRMLASAGELQKGNELALPSKYVNFLYLASHYEKLKGSPEDNEQKQLFVEQHKHYLDEIIEQISEFSKRVILADANLDKVLSAYNKHRDKPIREQAENIIHLFTLTNLGAPAAFKYFDTTIDRKRYTSTKEVLDATLIHQSITGLYETRIDLSQLGGDEGADKRTADGSEFESPKKKRKV

SEQ ID NO: 261 - protein, 1786 aa, Artificial Sequence
  Description of Artificial Sequence: Synthetic polypeptide
MSEVEFSHEYWMRHALTLAKRAWDEREVPVGAVLVHNNRVIGEGWNRPIGRHDPTAHAEIMALRQGGLVMQNYRLIDATLYVTLEPCVMCAGAMIHSRIGRVVFGARDAKTGAAGSLMDVLHHPGMNHRVEITEGILADECAALLSDFFRMRRQEIKAQKKAQSSTDSGGSSGGSSGSETPGTSESATPESSGGSSGGSSEVEFSHEYWMRHALTLAKRARDEREVPVGAVLVLNNRVIGEGWNRAIGLHDPTAHAEIMALRQGGLVMQNYRLIDATLYSTFEPCVMCAGAMIHSRIGRVVFGVRNAKTGAAGSLMDVLHYPGMNHRVEITEGILADECAALLCYFFRMPRRVFNAQKKAQSSTDSGGSSGGSSGSETPGTSESATPESSGGSSGGSDKKYSIGLAIGTNSVGWAVITDEYKVPSKKFKVLGNTDRHSIKKNLIGALLFDSGETAEATRLKRTARRRYTRRKNRICYLQEIFSNEMAKVDDSFFHRLEESFLVEEDKKHERHPIFGNIVDEVAYHEKYPTIYHLRKKLVDSTDKADLRLIYLALAHMIKFRGHFLIEGDLNPDNSDVDKLFIQLVQTYNQLFEENPINASGVDAKAILSARLSKSRRLENLIAQLPGEKKNGLFGNLIALSLGLTPNFKSNFDLAEDAKLQLSKDTYDDDLDNLLAQIGDQYADLFLAAKNLSDAILLSDILRVNTEITKAPLSASMIKRYDEHHQDLTLLKALVRQQLPEKYKEIFFDQSKNGYAGYIDGGASQEEFYKFIKPILEKMDGTEELLVKLNREDLLRKQRTFDNGSIPHQIHLGELHAILRRQEDFYPFLKDNREKIEKILTFRIPYYVGPLARGNSRFAWMTRKSEETITPWNFEEVVDKGASAQSFIERMTNFDKNLPNEKVLPKHSLLYEYFTVYNELTKVKYVTEGMRKPAFLSGEQKKAIVDLLFKTNRKVTVKQLKEDYFKKIECFDSVEISGVEDRFNASLGTYHDLLKIIKDKDFLDNEENEDILEDIVLTLTLFEDREMIEERLKTYAHLFDDKVMKQLKRRRYTGWGRLSRKLINGIRDKQSGKTILDFLKSDGFANRNFMQLIHDDSLTFKEDIQKAQVSGQGDSLHEHIANLAGSPAIKKGILQTVKVVDELVKVMGRHKPENIVIEMARENQTTQKGQKNSRERMKRIEEGIKELGSQILKEHPVENTQLQNEKLYLYYLQNGRDMYVDQELDINRLSDYDVDHIVPQSFLKDDSIDNKVLTRSDKNRGKSDNVPSEEVVKKMKNYWRQLLNAKLITQRKFDNLTKAERGGLSELDKAGFIKRQLVETRQITKHVAQILDSRMNTKYDENDKLIREVKVITLKSKLVSDFRKDFQFYKVREINNYHHAHDAYLNAVVGTALIKKYPKLESEFVYGDYKVYDVRKMIAKSEQEIGKATAKYFFYSNIMNFFKTEITLANGEIRKRPLIETNGETGEIVWDKGRDFATVRKVLSMPQVNIVKKTEVQTGGFSKESILPKRNSDKLIARKKDWDPKKYGGFDSPTVAYSVLVVAKVEKGKSKKLKSVKELLGITIMERSSFEKNPIDFLEAKGYKEVKKDLIIKLPKYSLFELENGRKRMLASAGELQKGNELALPSKYVNFLYLASHYEKLKGSPEDNEQKQLFVEQHKHYLDEIIEQISEFSKRVILADANLDKVLSAYNKHRDKPIREQAENIIHLFTLTNLGAPAAFKYFDTTIDRKRYTSTKEVLDATLIHQSITGLYETRIDLSQLGGDEGADKRTADGSEFESPKKKRKV

SEQ ID NO: 262 - protein, 1588 aa, Artificial Sequence
  Description of Artificial Sequence: Synthetic polypeptide
MSEVEFSHEYWMRHALTLAKRARDEREVPVGAVLVLNNRVIGEGWNRAIGLHDPTAHAEIMALRQGGLVMQNYRLYDATLYSTFEPCVMCAGAMIHSRIGRVVFGVRNAKTGAAGSLMDVLHHPGMNHRVEITEGILADECAALLCRFFRMPRRVFNAQKKAQSSTDSGGSSGGSSGSETPGTSESATPESSGGSSGGSDKKYSIGLAIGTNSVGWAVITDEYKVPSKKFKVLGNTDRHSIKKNLIGALLFDSGETAEATRLKRTARRRYTRRKNRICYLQEIFSNEMAKVDDSFFHRLEESFLVEEDKKHERHPIFGNIVDEVAYHEKYPTIYHLRKKLVDSTDKADLRLIYLALAHMIKFRGHFLIEGDLNPDNSDVDKLFIQLVQTYNQLFEENPINASGVDAKAILSARLSKSRRLENLIAQLPGEKKNGLFGNLIALSLGLTPNFKSNFDLAEDAKLQLSKDTYDDDLDNLLAQIGDQYADLFLAAKNLSDAILLSDILRVNTEITKAPLSASMIKRYDEHHQDLTLLKALVRQQLPEKYKEIFFDQSKNGYAGYIDGGASQEEFYKFIKPILEKMDGTEELLVKLNREDLLRKQRTFDNGSIPHQIHLGELHAILRRQEDFYPFLKDNREKIEKILTFRIPYYVGPLARGNSRFAWMTRKSEETITPWNFEEVVDKGASAQSFIERMTNFDKNLPNEKVLPKHSLLYEYFTVYNELTKVKYVTEGMRKPAFLSGEQKKAIVDLLFKTNRKVTVKQLKEDYFKKIECFDSVEISGVEDRFNASLGTYHDLLKIIKDKDFLDNEENEDILEDIVLTLTLFEDREMIEERLKTYAHLFDDKVMKQLKRRRYTGWGRLSRKLINGIRDKQSGKTILDFLKSDGFANRNFMQLIHDDSLTFKEDIQKAQVSGQGDSLHEHIANLAGSPAIKKGILQTVKVVDELVKVMGRHKPENIVIEMARENQTTQKGQKNSRERMKRIEEGIKELGSQILKEHPVENTQLQNEKLYLYYLQNGRDMYVDQELDINRLSDYDVDHIVPQSFLKDDSIDNKVLTRSDKNRGKSDNVPSEEVVKKMKNYWRQLLNAKLITQRKFDNLTKAERGGLSELDKAGFIKRQLVETRQITKHVAQILDSRMNTKYDENDKLIREVKVITLKSKLVSDFRKDFQFYKVREINNYHHAHDAYLNAVVGTALIKKYPKLESEFVYGDYKVYDVRKMIAKSEQEIGKATAKYFFYSNIMNFFKTEITLANGEIRKRPLIETNGETGEIVWDKGRDFATVRKVLSMPQVNIVKKTEVQTGGFSKESILPKRNSDKLIARKKDWDPKKYGGFDSPTVAYSVLVVAKVEKGKSKKLKSVKELLGITIMERSSFEKNPIDFLEAKGYKEVKKDLIIKLPKYSLFELENGRKRMLASAGELQKGNELALPSKYVNFLYLASHYEKLKGSPEDNEQKQLFVEQHKHYLDEIIEQISEFSKRVILADANLDKVLSAYNKHRDKPIREQAENIIHLFTLTNLGAPAAFKYFDTTIDRKRYTSTKEVLDATLIHQSITGLYETRIDLSQLGGDEGADKRTADGSEFESPKKKRKV

SEQ ID NO: 263 - protein, 1786 aa, Artificial Sequence
  Description of Artificial Sequence: Synthetic polypeptide
MSEVEFSHEYWMRHALTLAKRAWDEREVPVGAVLVHNNRVIGEGWNRPIGRHDPTAHAEIMALRQGGLVMQNYRLIDATLYVTLEPCVMCAGAMIHSRIGRVVFGARDAKTGAAGSLMDVLHHPGMNHRVEITEGILADECAALLSDFFRMRRQEIKAQKKAQSSTDSGGSSGGSSGSETPGTSESATPESSGGSSGGSSEVEFSHEYWMRHALTLAKRARDEREVPVGAVLVLNNRVIGEGWNRAIGLHDPTAHAEIMALRQGGLVMQNYRLYDATLYSTFEPCVMCAGAMIHSRIGRVVFGVRNAKTGAAGSLMDVLHHPGMNHRVEITEGILADECAALLCRFFRMPRRVFNAQKKAQSSTDSGGSSGGSSGSETPGTSESATPESSGGSSGGSDKKYSIGLAIGTNSVGWAVITDEYKVPSKKFKVLGNTDRHSIKKNLIGALLFDSGETAEATRLKRTARRRYTRRKNRICYLQEIFSNEMAKVDDSFFHRLEESFLVEEDKKHERHPIFGNIVDEVAYHEKYPTIYHLRKKLVDSTDKADLRLIYLALAHMIKFRGHFLIEGDLNPDNSDVDKLFIQLVQTYNQLFEENPINASGVDAKAILSARLSKSRRLENLIAQLPGEKKNGLFGNLIALSLGLTPNFKSNFDLAEDAKLQLSKDTYDDDLDNLLAQIGDQYADLFLAAKNLSDAILLSDILRVNTEITKAPLSASMIKRYDEHHQDLTLLKALVRQQLPEKYKEIFFDQSKNGYAGYIDGGASQEEFYKFIKPILEKMDGTEELLVKLNREDLLRKQRTFDNGSIPHQIHLGELHAILRRQEDFYPFLKDNREKIEKILTFRIPYYVGPLARGNSRFAWMTRKSEETITPWNFEEVVDKGASAQSFIERMTNFDKNLPNEKVLPKHSLLYEYFTVYNELTKVKYVTEGMRKPAFLSGEQKKAIVDLLFKTNRKVTVKQLKEDYFKKIECFDSVEISGVEDRFNASLGTYHDLLKIIKDKDFLDNEENEDILEDIVLTLTLFEDREMIEERLKTYAHLFDDKVMKQLKRRRYTGWGRLSRKLINGIRDKQSGKTILDFLKSDGFANRNFMQLIHDDSLTFKEDIQKAQVSGQGDSLHEHIANLAGSPAIKKGILQTVKVVDELVKVMGRHKPENIVIEMARENQTTQKGQKNSRERMKRIEEGIKELGSQILKEHPVENTQLQNEKLYLYYLQNGRDMYVDQELDINRLSDYDVDHIVPQSFLKDDSIDNKVLTRSDKNRGKSDNVPSEEVVKKMKNYWRQLLNAKLITQRKFDNLTKAERGGLSELDKAGFIKRQLVETRQITKHVAQILDSRMNTKYDENDKLIREVKVITLKSKLVSDFRKDFQFYKVREINNYHHAHDAYLNAVVGTALIKKYPKLESEFVYGDYKVYDVRKMIAKSEQEIGKATAKYFFYSNIMNFFKTEITLANGEIRKRPLIETNGETGEIVWDKGRDFATVRKVLSMPQVNIVKKTEVQTGGFSKESILPKRNSDKLIARKKDWDPKKYGGFDSPTVAYSVLVVAKVEKGKSKKLKSVKELLGITIMERSSFEKNPIDFLEAKGYKEVKKDLIIKLPKYSLFELENGRKRMLASAGELQKGNELALPSKYVNFLYLASHYEKLKGSPEDNEQKQLFVEQHKHYLDEIIEQISEFSKRVILADANLDKVLSAYNKHRDKPIREQAENIIHLFTLTNLGAPAAFKYFDTTIDRKRYTSTKEVLDATLIHQSITGLYETRIDLSQLGGDEGADKRTADGSEFESPKKKRKV

SEQ ID NO: 264 - protein, 1588 aa, Artificial Sequence
  Description of Artificial Sequence: Synthetic polypeptide
MSEVEFSHEYWMRHALTLAKRARDEREVPVGAVLVLNNRVIGEGWNRAIGLHDPTAHAEIMALRQGGLVMQNYRLIDATLYVTFEPCVMCAGAMIHSRIGRVVFGVRNAKTGAAGSLMDVLHYPGMNHRVEITEGILADECAALLCTFFRMPRQVFNAQKKAQSSTDSGGSSGGSSGSETPGTSESATPESSGGSSGGSDKKYSIGLAIGTNSVGWAVITDEYKVPSKKFKVLGNTDRHSIKKNLIGALLFDSGETAEATRLKRTARRRYTRRKNRICYLQEIFSNEMAKVDDSFFHRLEESFLVEEDKKHERHPIFGNIVDEVAYHEKYPTIYHLRKKLVDSTDKADLRLIYLALAHMIKFRGHFLIEGDLNPDNSDVDKLFIQLVQTYNQLFEENPINASGVDAKAILSARLSKSRRLENLIAQLPGEKKNGLFGNLIALSLGLTPNFKSNFDLAEDAKLQLSKDTYDDDLDNLLAQIGDQYADLFLAAKNLSDAILLSDILRVNTEITKAPLSASMIKRYDEHHQDLTLLKALVRQQLPEKYKEIFFDQSKNGYAGYIDGGASQEEFYKFIKPILEKMDGTEELLVKLNREDLLRKQRTFDNGSIPHQIHLGELHAILRRQEDFYPFLKDNREKIEKILTFRIPYYVGPLARGNSRFAWMTRKSEETITPWNFEEVVDKGASAQSFIERMTNFDKNLPNEKVLPKHSLLYEYFTVYNELTKVKYVTEGMRKPAFLSGEQKKAIVDLLFKTNRKVTVKQLKEDYFKKIECFDSVEISGVEDRFNASLGTYHDLLKIIKDKDFLDNEENEDILEDIVLTLTLFEDREMIEERLKTYAHLFDDKVMKQLKRRRYTGWGRLSRKLINGIRDKQSGKTILDFLKSDGFANRNFMQLIHDDSLTFKEDIQKAQVSGQGDSLHEHIANLAGSPAIKKGILQTVKVVDELVKVMGRHKPENIVIEMARENQTTQKGQKNSRERMKRIEEGIKELGSQILKEHPVENTQLQNEKLYLYYLQNGRDMYVDQELDINRLSDYDVDHIVPQSFLKDDSIDNKVLTRSDKNRGKSDNVPSEEVVKKMKNYWRQLLNAKLITQRKFDNLTKAERGGLSELDKAGFIKRQLVETRQITKHVAQILDSRMNTKYDENDKLIREVKVITLKSKLVSDFRKDFQFYKVREINNYHHAHDAYLNAVVGTALIKKYPKLESEFVYGDYKVYDVRKMIAKSEQEIGKATAKYFFYSNIMNFFKTEITLANGEIRKRPLIETNGETGEIVWDKGRDFATVRKVLSMPQVNIVKKTEVQTGGFSKESILPKRNSDKLIARKKDWDPKKYGGFVSPTVAYSVLVVAKVEKGKSKKLKSVKELLGITIMERSSFEKNPIDFLEAKGYKEVKKDLIIKLPKYSLFELENGRKRMLASARELQKGNELALPSKYVNFLYLASHYEKLKGSPEDNEQKQLFVEQHKHYLDEIIEQISEFSKRVILADANLDKVLSAYNKHRDKPIREQAENIIHLFTLTNLGAPAAFKYFDTTIDRKQYRSTKEVLDATLIHQSITGLYETRIDLSQLGGDEGADKRTADGSEFESPKKKRKV

SEQ ID NO: 265 - protein, 1588 aa, Artificial Sequence
  Description of Artificial Sequence: Synthetic polypeptide
MSEVEFSHEYWMRHALTLAKRARDEREVPVGAVLVLNNRVIGEGWNRAIGLHDPTAHAEIMALRQGGLVMQNYRLIDATLYVTFEPCVMCAGAMIHSRIGRVVFGVRNAKTGAAGSLMDVLHYPGMNHRVEITEGILADECAALLCRFFRMPRQVFNAQKKAQSSTDSGGSSGGSSGSETPGTSESATPESSGGSSGGSDKKYSIGLAIGTNSVGWAVITDEYKVPSKKFKVLGNTDRHSIKKNLIGALLFDSGETAEATRLKRTARRRYTRRKNRICYLQEIFSNEMAKVDDSFFHRLEESFLVEEDKKHERHPIFGNIVDEVAYHEKYPTIYHLRKKLVDSTDKADLRLIYLALAHMIKFRGHFLIEGDLNPDNSDVDKLFIQLVQTYNQLFEENPINASGVDAKAILSARLSKSRRLENLIAQLPGEKKNGLFGNLIALSLGLTPNFKSNFDLAEDAKLQLSKDTYDDDLDNLLAQIGDQYADLFLAAKNLSDAILLSDILRVNTEITKAPLSASMIKRYDEHHQDLTLLKALVRQQLPEKYKEIFFDQSKNGYAGYIDGGASQEEFYKFIKPILEKMDGTEELLVKLNREDLLRKQRTFDNGSIPHQIHLGELHAILRRQEDFYPFLKDNREKIEKILTFRIPYYVGPLARGNSRFAWMTRKSEETITPWNFEEVVDKGASAQSFIERMTNFDKNLPNEKVLPKHSLLYEYFTVYNELTKVKYVTEGMRKPAFLSGEQKKAIVDLLFKTNRKVTVKQLKEDYFKKIECFDSVEISGVEDRFNASLGTYHDLLKIIKDKDFLDNEENEDILEDIVLTLTLFEDREMIEERLKTYAHLFDDKVMKQLKRRRYTGWGRLSRKLINGIRDKQSGKTILDFLKSDGFANRNFMQLIHDDSLTFKEDIQKAQVSGQGDSLHEHIANLAGSPAIKKGILQTVKVVDELVKVMGRHKPENIVIEMARENQTTQKGQKNSRERMKRIEEGIKELGSQILKEHPVENTQLQNEKLYLYYLQNGRDMYVDQELDINRLSDYDVDHIVPQSFLKDDSIDNKVLTRSDKNRGKSDNVPSEEVVKKMKNYWRQLLNAKLITQRKFDNLTKAERGGLSELDKAGFIKRQLVETRQITKHVAQILDSRMNTKYDENDKLIREVKVITLKSKLVSDFRKDFQFYKVREINNYHHAHDAYLNAVVGTALIKKYPKLESEFVYGDYKVYDVRKMIAKSEQEIGKATAKYFFYSNIMNFFKTEITLANGEIRKRPLIETNGETGEIVWDKGRDFATVRKVLSMPQVNIVKKTEVQTGGFSKESILPKRNSDKLIARKKDWDPKKYGGFVSPTVAYSVLVVAKVEKGKSKKLKSVKELLGITIMERSSFEKNPIDFLEAKGYKEVKKDLIIKLPKYSLFELENGRKRMLASARELQKGNELALPSKYVNFLYLASHYEKLKGSPEDNEQKQLFVEQHKHYLDEIIEQISEFSKRVILADANLDKVLSAYNKHRDKPIREQAENIIHLFTLTNLGAPAAFKYFDTTIDRKQYRSTKEVLDATLIHQSITGLYETRIDLSQLGGDEGADKRTADGSEFESPKKKRKV

SEQ ID NO: 266 - protein, 1588 aa, Artificial Sequence
  Description of Artificial Sequence: Synthetic polypeptide
MSEVEFSHEYWMRHALTLAKRARDEREVPVGAVLVLNNRVIGEGWNRAIGLHDPTAHAEIMALRQGGLVMQNYRLIDATLYVTFEPCVMCAGAMIHSRIGRVVFGVRNAKTGAAGSLMDVLHYPGMNHRVEITEGILADECAALLCYFFRMPRSVFNAQKKAQSSTDSGGSSGGSSGSETPGTSESATPESSGGSSGGSDKKYSIGLAIGTNSVGWAVITDEYKVPSKKFKVLGNTDRHSIKKNLIGALLFDSGETAEATRLKRTARRRYTRRKNRICYLQEIFSNEMAKVDDSFFHRLEESFLVEEDKKHERHPIFGNIVDEVAYHEKYPTIYHLRKKLVDSTDKADLRLIYLALAHMIKFRGHFLIEGDLNPDNSDVDKLFIQLVQTYNQLFEENPINASGVDAKAILSARLSKSRRLENLIAQLPGEKKNGLFGNLIALSLGLTPNFKSNFDLAEDAKLQLSKDTYDDDLDNLLAQIGDQYADLFLAAKNLSDAILLSDILRVNTEITKAPLSASMIKRYDEHHQDLTLLKALVRQQLPEKYKEIFFDQSKNGYAGYIDGGASQEEFYKFIKPILEKMDGTEELLVKLNREDLLRKQRTFDNGSIPHQIHLGELHAILRRQEDFYPFLKDNREKIEKILTFRIPYYVGPLARGNSRFAWMTRKSEETITPWNFEEVVDKGASAQSFIERMTNFDKNLPNEKVLPKHSLLYEYFTVYNELTKVKYVTEGMRKPAFLSGEQKKAIVDLLFKTNRKVTVKQLKEDYFKKIECFDSVEISGVEDRFNASLGTYHDLLKIIKDKDFLDNEENEDILEDIVLTLTLFEDREMIEERLKTYAHLFDDKVMKQLKRRRYTGWGRLSRKLINGIRDKQSGKTILDFLKSDGFANRNFMQLIHDDSLTFKEDIQKAQVSGQGDSLHEHIANLAGSPAIKKGILQTVKVVDELVKVMGRHKPENIVIEMARENQTTQKGQKNSRERMKRIEEGIKELGSQILKEHPVENTQLQNEKLYLYYLQNGRDMYVDQELDINRLSDYDVDHIVPQSFLKDDSIDNKVLTRSDKNRGKSDNVPSEEVVKKMKNYWRQLLNAKLITQRKFDNLTKAERGGLSELDKAGFIKRQLVETRQITKHVAQILDSRMNTKYDENDKLIREVKVITLKSKLVSDFRKDFQFYKVREINNYHHAHDAYLNAVVGTALIKKYPKLESEFVYGDYKVYDVRKMIAKSEQEIGKATAKYFFYSNIMNFFKTEITLANGEIRKRPLIETNGETGEIVWDKGRDFATVRKVLSMPQVNIVKKTEVQTGGFSKESILPKRNSDKLIARKKDWDPKKYGGFVSPTVAYSVLVVAKVEKGKSKKLKSVKELLGITIMERSSFEKNPIDFLEAKGYKEVKKDLIIKLPKYSLFELENGRKRMLASARELQKGNELALPSKYVNFLYLASHYEKLKGSPEDNEQKQLFVEQHKHYLDEIIEQISEFSKRVILADANLDKVLSAYNKHRDKPIREQAENIIHLFTLTNLGAPAAFKYFDTTIDRKQYRSTKEVLDATLIHQSITGLYETRIDLSQLGGDEGADKRTADGSEFESPKKKRKV

SEQ ID NO: 267 - protein, 1588 aa, Artificial Sequence
  Description of Artificial Sequence: Synthetic polypeptide
MSEVEFSHEYWMRHALTLAKRARDEREVPVGAVLVLNNRVIGEGWNRAIGLHDPTAHAEIMALRQGGLVMQNYRLIDATLYVTFEPCVMCAGAMIHSRIGRVVFGVRNAKTGAAGSLMDVLHHPGMNHRVEITEGILADECAALLCYFFRMPRQVFNAQKKAQSSTDSGGSSGGSSGSETPGTSESATPESSGGSSGGSDKKYSIGLAIGTNSVGWAVITDEYKVPSKKFKVLGNTDRHSIKKNLIGALLFDSGETAEATRLKRTARRRYTRRKNRICYLQEIFSNEMAKVDDSFFHRLEESFLVEEDKKHERHPIFGNIVDEVAYHEKYPTIYHLRKKLVDSTDKADLRLIYLALAHMIKFRGHFLIEGDLNPDNSDVDKLFIQLVQTYNQLFEENPINASGVDAKAILSARLSKSRRLENLIAQLPGEKKNGLFGNLIALSLGLTPNFKSNFDLAEDAKLQLSKDTYDDDLDNLLAQIGDQYADLFLAAKNLSDAILLSDILRVNTEITKAPLSASMIKRYDEHHQDLTLLKALVRQQLPEKYKEIFFDQSKNGYAGYIDGGASQEEFYKFIKPILEKMDGTEELLVKLNREDLLRKQRTFDNGSIPHQIHLGELHAILRRQEDFYPFLKDNREKIEKILTFRIPYYVGPLARGNSRFAWMTRKSEETITPWNFEEVVDKGASAQSFIERMTNFDKNLPNEKVLPKHSLLYEYFTVYNELTKVKYVTEGMRKPAFLSGEQKKAIVDLLFKTNRKVTVKQLKEDYFKKIECFDSVEISGVEDRFNASLGTYHDLLKIIKDKDFLDNEENEDILEDIVLTLTLFEDREMIEERLKTYAHLFDDKVMKQLKRRRYTGWGRLSRKLINGIRDKQSGKTILDFLKSDGFANRNFMQLIHDDSLTFKEDIQKAQVSGQGDSLHEHIANLAGSPAIKKGILQTVKVVDELVKVMGRHKPENIVIEMARENQTTQKGQKNSRERMKRIEEGIKELGSQILKEHPVENTQLQNEKLYLYYLQNGRDMYVDQELDINRLSDYDVDHIVPQSFLKDDSIDNKVLTRSDKNRGKSDNVPSEEVVKKMKNYWRQLLNAKLITQRKFDNLTKAERGGLSELDKAGFIKRQLVETRQITKHVAQILDSRMNTKYDENDKLIREVKVITLKSKLVSDFRKDFQFYKVREINNYHHAHDAYLNAVVGTALIKKYPKLESEFVYGDYKVYDVRKMIAKSEQEIGKATAKYFFYSNIMNFFKTEITLANGEIRKRPLIETNGETGEIVWDKGRDFATVRKVLSMPQVNIVKKTEVQTGGFSKESILPKRNSDKLIARKKDWDPKKYGGFVSPTVAYSVLVVAKVEKGKSKKLKSVKELLGITIMERSSFEKNPIDFLEAKGYKEVKKDLIIKLPKYSLFELENGRKRMLASARELQKGNELALPSKYVNFLYLASHYEKLKGSPEDNEQKQLFVEQHKHYLDEIIEQISEFSKRVILADANLDKVLSAYNKHRDKPIREQAENIIHLFTLTNLGAPAAFKYFDTTIDRKQYRSTKEVLDATLIHQSITGLYETRIDLSQLGGDEGADKRTADGSEFESPKKKRKV

SEQ ID NO: 268 - protein, 1588 aa, Artificial Sequence
  Description of Artificial Sequence: Synthetic polypeptide
MSEVEFSHEYWMRHALTLAKRARDEREVPVGAVLVLNNRVIGEGWNRAIGLHDPTAHAEIMALRQGGLVMQNYRLIDATLYSTFEPCVMCAGAMIHSRIGRVVFGVRNAKTGAAGSLMDVLHYPGMNHRVEITEGILADECAALLCYFFRMPRQVFNAQKKAQSSTDSGGSSGGSSGSETPGTSESATPESSGGSSGGSDKKYSIGLAIGTNSVGWAVITDEYKVPSKKFKVLGNTDRHSIKKNLIGALLFDSGETAEATRLKRTARRRYTRRKNRICYLQEIFSNEMAKVDDSFFHRLEESFLVEEDKKHERHPIFGNIVDEVAYHEKYPTIYHLRKKLVDSTDKADLRLIYLALAHMIKFRGHFLIEGDLNPDNSDVDKLFIQLVQTYNQLFEENPINASGVDAKAILSARLSKSRRLENLIAQLPGEKKNGLFGNLIALSLGLTPNFKSNFDLAEDAKLQLSKDTYDDDLDNLLAQIGDQYADLFLAAKNLSDAILLSDILRVNTEITKAPLSASMIKRYDEHHQDLTLLKALVRQQLPEKYKEIFFDQSKNGYAGYIDGGASQEEFYKFIKPILEKMDGTEELLVKLNREDLLRKQRTFDNGSIPHQIHLGELHAILRRQEDFYPFLKDNREKIEKILTFRIPYYVGPLARGNSRFAWMTRKSEETITPWNFEEVVDKGASAQSFIERMTNFDKNLPNEKVLPKHSLLYEYFTVYNELTKVKYVTEGMRKPAFLSGEQKKAIVDLLFKTNRKVTVKQLKEDYFKKIECFDSVEISGVEDRFNASLGTYHDLLKIIKDKDFLDNEENEDILEDIVLTLTLFEDREMIEERLKTYAHLFDDKVMKQLKRRRYTGWGRLSRKLINGIRDKQSGKTILDFLKSDGFANRNFMQLIHDDSLTFKEDIQKAQVSGQGDSLHEHIANLAGSPAIKKGILQTVKVVDELVKVMGRHKPENIVIEMARENQTTQKGQKNSRERMKRIEEGIKELGSQILKEHPVENTQLQNEKLYLYYLQNGRDMYVDQELDINRLSDYDVDHIVPQSFLKDDSIDNKVLTRSDKNRGKSDNVPSEEVVKKMKNYWRQLLNAKLITQRKFDNLTKAERGGLSELDKAGFIKRQLVETRQITKHVAQILDSRMNTKYDENDKLIREVKVITLKSKLVSDFRKDFQFYKVREINNYHHAHDAYLNAVVGTALIKKYPKLESEFVYGDYKVYDVRKMIAKSEQEIGKATAKYFFYSNIMNFFKTEITLANGEIRKRPLIETNGETGEIVWDKGRDFATVRKVLSMPQVNIVKKTEVQTGGFSKESILPKRNSDKLIARKKDWDPKKYGGFVSPTVAYSVLVVAKVEKGKSKKLKSVKELLGITIMERSSFEKNPIDFLEAKGYKEVKKDLIIKLPKYSLFELENGRKRMLASARELQKGNELALPSKYVNFLYLASHYEKLKGSPEDNEQKQLFVEQHKHYLDEIIEQISEFSKRVILADANLDKVLSAYNKHRDKPIREQAENIIHLFTLTNLGAPAAFKYFDTTIDRKQYRSTKEVLDATLIHQSITGLYETRIDLSQLGGDEGADKRTADGSEFESPKKKRKV

SEQ ID NO: 269 - protein, 1588 aa, Artificial Sequence
  Description of Artificial Sequence: Synthetic polypeptide
MSEVEFSHEYWMRHALTLAKRARDEREVPVGAVLVLNNRVIGEGWNRAIGLHDPTAHAEIMALRQGGLVMQNYRLIDATLYVTFEPCVMCAGAMIHSRIGRVVFGVRNAKTGAAGSLMDVLHYPGMNHRVEITEGILADECAALLCYFFRMPRQVFNAQKKAQSSRDSGGSSGGSSGSETPGTSESATPESSGGSSGGSDKKYSIGLAIGTNSVGWAVITDEYKVPSKKFKVLGNTDRHSIKKNLIGALLFDSGETAEATRLKRTARRRYTRRKNRICYLQEIFSNEMAKVDDSFFHRLEESFLVEEDKKHERHPIFGNIVDEVAYHEKYPTIYHLRKKLVDSTDKADLRLIYLALAHMIKFRGHFLIEGDLNPDNSDVDKLFIQLVQTYNQLFEENPINASGVDAKAILSARLSKSRRLENLIAQLPGEKKNGLFGNLIALSLGLTPNFKSNFDLAEDAKLQLSKDTYDDDLDNLLAQIGDQYADLFLAAKNLSDAILLSDILRVNTEITKAPLSASMIKRYDEHHQDLTLLKALVRQQLPEKYKEIFFDQSKNGYAGYIDGGASQEEFYKFIKPILEKMDGTEELLVKLNREDLLRKQRTFDNGSIPHQIHLGELHAILRRQEDFYPFLKDNREKIEKILTFRIPYYVGPLARGNSRFAWMTRKSEETITPWNFEEVVDKGASAQSFIERMTNFDKNLPNEKVLPKHSLLYEYFTVYNELTKVKYVTEGMRKPAFLSGEQKKAIVDLLFKTNRKVTVKQLKEDYFKKIECFDSVEISGVEDRFNASLGTYHDLLKIIKDKDFLDNEENEDILEDIVLTLTLFEDREMIEERLKTYAHLFDDKVMKQLKRRRYTGWGRLSRKLINGIRDKQSGKTILDFLKSDGFANRNFMQLIHDDSLTFKEDIQKAQVSGQGDSLHEHIANLAGSPAIKKGILQTVKVVDELVKVMGRHKPENIVIEMARENQTTQKGQKNSRERMKRIEEGIKELGSQILKEHPVENTQLQNEKLYLYYLQNGRDMYVDQELDINRLSDYDVDHIVPQSFLKDDSIDNKVLTRSDKNRGKSDNVPSEEVVKKMKNYWRQLLNAKLITQRKFDNLTKAERGGLSELDKAGFIKRQLVETRQITKHVAQILDSRMNTKYDENDKLIREVKVITLKSKLVSDFRKDFQFYKVREINNYHHAHDAYLNAVVGTALIKKYPKLESEFVYGDYKVYDVRKMIAKSEQEIGKATAKYFFYSNIMNFFKTEITLANGEIRKRPLIETNGETGEIVWDKGRDFATVRKVLSMPQVNIVKKTEVQTGGFSKESILPKRNSDKLIARKKDWDPKKYGGFVSPTVAYSVLVVAKVEKGKSKKLKSVKELLGITIMERSSFEKNPIDFLEAKGYKEVKKDLIIKLPKYSLFELENGRKRMLASARELQKGNELALPSKYVNFLYLASHYEKLKGSPEDNEQKQLFVEQHKHYLDEIIEQISEFSKRVILADANLDKVLSAYNKHRDKPIREQAENIIHLFTLTNLGAPAAFKYFDTTIDRKQYRSTKEVLDATLIHQSITGLYETRIDLSQLGGDEGADKRTADGSEFESPKKKRKV

SEQ ID NO: 270 - protein, 1588 aa, Artificial Sequence
  Description of Artificial Sequence: Synthetic polypeptide
MSEVEFSHEYWMRHALTLAKRARDEREVPVGAVLVLNNRVIGEGWNRAIGLHDPTAHAEIMALRQGGLVMQNYRLIDATLYVTFEPCVMCAGAMIHSRIGRVVFGVRNAKTGAAGSLMDVLHYPGMNHRVEITEGILADECAALLCYFFRMPRRVFNAQKKAQSSTDSGGSSGGSSGSETPGTSESATPESSGGSSGGSDKKYSIGLAIGTNSVGWAVITDEYKVPSKKFKVLGNTDRHSIKKNLIGALLFDSGETAEATRLKRTARRRYTRRKNRICYLQEIFSNEMAKVDDSFFHRLEESFLVEEDKKHERHPIFGNIVDEVAYHEKYPTIYHLRKKLVDSTDKADLRLIYLALAHMIKFRGHFLIEGDLNPDNSDVDKLFIQLVQTYNQLFEENPINASGVDAKAILSARLSKSRRLENLIAQLPGEKKNGLFGNLIALSLGLTPNFKSNFDLAEDAKLQLSKDTYDDDLDNLLAQIGDQYADLFLAAKNLSDAILLSDILRVNTEITKAPLSASMIKRYDEHHQDLTLLKALVRQQLPEKYKEIFFDQSKNGYAGYIDGGASQEEFYKFIKPILEKMDGTEELLVKLNREDLLRKQRTFDNGSIPHQIHLGELHAILRRQEDFYPFLKDNREKIEKILTFRIPYYVGPLARGNSRFAWMTRKSEETITPWNFEEVVDKGASAQSFIERMTNFDKNLPNEKVLPKHSLLYEYFTVYNELTKVKYVTEGMRKPAFLSGEQKKAIVDLLFKTNRKVTVKQLKEDYFKKIECFDSVEISGVEDRFNASLGTYHDLLKIIKDKDFLDNEENEDILEDIVLTLTLFEDREMIEERLKTYAHLFDDKVMKQLKRRRYTGWGRLSRKLINGIRDKQSGKTILDFLKSDGFANRNFMQLIHDDSLTFKEDIQKAQVSGQGDSLHEHIANLAGSPAIKKGILQTVKVVDELVKVMGRHKPENIVIEMARENQTTQKGQKNSRERMKRIEEGIKELGSQILKEHPVENTQLQNEKLYLYYLQNGRDMYVDQELDINRLSDYDVDHIVPQSFLKDDSIDNKVLTRSDKNRGKSDNVPSEEVVKKMKNYWRQLLNAKLITQRKFDNLTKAERGGLSELDKAGFIKRQLVETRQITKHVAQILDSRMNTKYDENDKLIREVKVITLKSKLVSDFRKDFQFYKVREINNYHHAHDAYLNAVVGTALIKKYPKLESEFVYGDYKVYDVRKMIAKSEQEIGKATAKYFFYSNIMNFFKTEITLANGEIRKRPLIETNGETGEIVWDKGRDFATVRKVLSMPQVNIVKKTEVQTGGFSKESILPKRNSDKLIARKKDWDPKKYGGFVSPTVAYSVLVVAKVEKGKSKKLKSVKELLGITIMERSSFEKNPIDFLEAKGYKEVKKDLIIKLPKYSLFELENGRKRMLASARELQKGNELALPSKYVNFLYLASHYEKLKGSPEDNEQKQLFVEQHKHYLDEIIEQISEFSKRVILADANLDKVLSAYNKHRDKPIREQAENIIHLFTLTNLGAPAAFKYFDTTIDRKQYRSTKEVLDATLIHQSITGLYETRIDLSQLGGDEGADKRTADGSEFESPKKKRKV

SEQ ID NO: 271 - protein, 1588 aa, Artificial Sequence
  Description of Artificial Sequence: Synthetic polypeptide
MSEVEFSHEYWMRHALTLAKRARDEREVPVGAVLVLNNRVIGEGWNRAIGLHDPTAHAEIMALRQGGLVMQNYRLIDATLYVTFEPCVMCAGAMIHSRIGRVVFGVRNAKTGAAGSLMDVLHHPGMNHRVEITEGILADECAALLCRFFRMPRRVFNAQKKAQSSTDSGGSSGGSSGSETPGTSESATPESSGGSSGGSDKKYSIGLAIGTNSVGWAVITDEYKVPSKKFKVLGNTDRHSIKKNLIGALLFDSGETAEATRLKRTARRRYTRRKNRICYLQEIFSNEMAKVDDSFFHRLEESFLVEEDKKHERHPIFGNIVDEVAYHEKYPTIYHLRKKLVDSTDKADLRLIYLALAHMIKFRGHFLIEGDLNPDNSDVDKLFIQLVQTYNQLFEENPINASGVDAKAILSARLSKSRRLENLIAQLPGEKKNGLFGNLIALSLGLTPNFKSNFDLAEDAKLQLSKDTYDDDLDNLLAQIGDQYADLFLAAKNLSDAILLSDILRVNTEITKAPLSASMIKRYDEHHQDLTLLKALVRQQLPEKYKEIFFDQSKNGYAGYIDGGASQEEFYKFIKPILEKMDGTEELLVKLNREDLLRKQRTFDNGSIPHQIHLGELHAILRRQEDFYPFLKDNREKIEKILTFRIPYYVGPLARGNSRFAWMTRKSEETITPWNFEEVVDKGASAQSFIERMTNFDKNLPNEKVLPKHSLLYEYFTVYNELTKVKYVTEGMRKPAFLSGEQKKAIVDLLFKTNRKVTVKQLKEDYFKKIECFDSVEISGVEDRFNASLGTYHDLLKIIKDKDFLDNEENEDILEDIVLTLTLFEDREMIEERLKTYAHLFDDKVMKQLKRRRYTGWGRLSRKLINGIRDKQSGKTILDFLKSDGFANRNFMQLIHDDSLTFKEDIQKAQVSGQGDSLHEHIANLAGSPAIKKGILQTVKVVDELVKVMGRHKPENIVIEMARENQTTQKGQKNSRERMKRIEEGIKELGSQILKEHPVENTQLQNEKLYLYYLQNGRDMYVDQELDINRLSDYDVDHIVPQSFLKDDSIDNKVLTRSDKNRGKSDNVPSEEVVKKMKNYWRQLLNAKLITQRKFDNLTKAERGGLSELDKAGFIKRQLVETRQITKHVAQILDSRMNTKYDENDKLIREVKVITLKSKLVSDFRKDFQFYKVREINNYHHAHDAYLNAVVGTALIKKYPKLESEFVYGDYKVYDVRKMIAKSEQEIGKATAKYFFYSNIMNFFKTEITLANGEIRKRPLIETNGETGEIVWDKGRDFATVRKVLSMPQVNIVKKTEVQTGGFSKESILPKRNSDKLIARKKDWDPKKYGGFVSPTVAYSVLVVAKVEKGKSKKLKSVKELLGITIMERSSFEKNPIDFLEAKGYKEVKKDLIIKLPKYSLFELENGRKRMLASARELQKGNELALPSKYVNFLYLASHYEKLKGSPEDNEQKQLFVEQHKHYLDEIIEQISEFSKRVILADANLDKVLSAYNKHRDKPIREQAENIIHLFTLTNLGAPAAFKYFDTTIDRKQYRSTKEVLDATLIHQSITGLYETRIDLSQLGGDEGADKRTADGSEFESPKKKRKV

SEQ ID NO: 272 - protein, 1588 aa, Artificial Sequence
  Description of Artificial Sequence: Synthetic polypeptide
MSEVEFSHEYWMRHALTLAKRARDEREVPVGAVLVLNNRVIGEGWNRAIGLHDPTAHAEIMALRQGGLVMQNYRLYDATLYVTFEPCVMCAGAMIHSRIGRVVFGVRNAKTGAAGSLMDVLHYPGMNHRVEITEGILADECAALLCRFFRMPRRVFNAQKKAQSSTDSGGSSGGSSGSETPGTSESATPESSGGSSGGSDKKYSIGLAIGTNSVGWAVITDEYKVPSKKFKVLGNTDRHSIKKNLIGALLFDSGETAEATRLKRTARRRYTRRKNRICYLQEIFSNEMAKVDDSFFHRLEESFLVEEDKKHERHPIFGNIVDEVAYHEKYPTIYHLRKKLVDSTDKADLRLIYLALAHMIKFRGHFLIEGDLNPDNSDVDKLFIQLVQTYNQLFEENPINASGVDAKAILSARLSKSRRLENLIAQLPGEKKNGLFGNLIALSLGLTPNFKSNFDLAEDAKLQLSKDTYDDDLDNLLAQIGDQYADLFLAAKNLSDAILLSDILRVNTEITKAPLSASMIKRYDEHHQDLTLLKALVRQQLPEKYKEIFFDQSKNGYAGYIDGGASQEEFYKFIKPILEKMDGTEELLVKLNREDLLRKQRTFDNGSIPHQIHLGELHAILRRQEDFYPFLKDNREKIEKILTFRIPYYVGPLARGNSRFAWMTRKSEETITPWNFEEVVDKGASAQSFIERMTNFDKNLPNEKVLPKHSLLYEYFTVYNELTKVKYVTEGMRKPAFLSGEQKKAIVDLLFKTNRKVTVKQLKEDYFKKIECFDSVEISGVEDRFNASLGTYHDLLKIIKDKDFLDNEENEDILEDIVLTLTLFEDREMIEERLKTYAHLFDDKVMKQLKRRRYTGWGRLSRKLINGIRDKQSGKTILDFLKSDGFANRNFMQLIHDDSLTFKEDIQKAQVSGQGDSLHEHIANLAGSPAIKKGILQTVKVVDELVKVMGRHKPENIVIEMARENQTTQKGQKNSRERMKRIEEGIKELGSQILKEHPVENTQLQNEKLYLYYLQNGRDMYVDQELDINRLSDYDVDHIVPQSFLKDDSIDNKVLTRSDKNRGKSDNVPSEEVVKKMKNYWRQLLNAKLITQRKFDNLTKAERGGLSELDKAGFIKRQLVETRQITKHVAQILDSRMNTKYDENDKLIREVKVITLKSKLVSDFRKDFQFYKVREINNYHHAHDAYLNAVVGTALIKKYPKLESEFVYGDYKVYDVRKMIAKSEQEIGKATAKYFFYSNIMNFFKTEITLANGEIRKRPLIETNGETGEIVWDKGRDFATVRKVLSMPQVNIVKKTEVQTGGFSKESILPKRNSDKLIARKKDWDPKKYGGFVSPTVAYSVLVVAKVEKGKSKKLKSVKELLGITIMERSSFEKNPIDFLEAKGYKEVKKDLIIKLPKYSLFELENGRKRMLASARELQKGNELALPSKYVNFLYLASHYEKLKGSPEDNEQKQLFVEQHKHYLDEIIEQISEFSKRVILADANLDKVLSAYNKHRDKPIREQAENIIHLFTLTNLGAPAAFKYFDTTIDRKQYRSTKEVLDATLIHQSITGLYETRIDLSQLGGDEGADKRTADGSEFESPKKKRKV

SEQ ID NO: 273 - protein, 1588 aa, Artificial Sequence
  Description of Artificial Sequence: Synthetic polypeptide
MSEVEFSHEYWMRHALTLAKRARDEREVPVGAVLVLNNRVIGEGWNRAIGLHDPTAHAEIMALRQGGLVMQNYRLIDATLYVTFEPCVMCAGAMIHSRIGRVVFGVRNAKTGAAGSLMDVLHYPGMNHRVEITEGILADECAALLCRFFRMPRRVFNAQKKAQSSRDSGGSSGGSSGSETPGTSESATPESSGGSSGGSDKKYSIGLAIGTNSVGWAVITDEYKVPSKKFKVLGNTDRHSIKKNLIGALLFDSGETAEATRLKRTARRRYTRRKNRICYLQEIFSNEMAKVDDSFFHRLEESFLVEEDKKHERHPIFGNIVDEVAYHEKYPTIYHLRKKLVDSTDKADLRLIYLALAHMIKFRGHFLIEGDLNPDNSDVDKLFIQLVQTYNQLFEENPINASGVDAKAILSARLSKSRRLENLIAQLPGEKKNGLFGNLIALSLGLTPNFKSNFDLAEDAKLQLSKDTYDDDLDNLLAQIGDQYADLFLAAKNLSDAILLSDILRVNTEITKAPLSASMIKRYDEHHQDLTLLKALVRQQLPEKYKEIFFDQSKNGYAGYIDGGASQEEFYKFIKPILEKMDGTEELLVKLNREDLLRKQRTFDNGSIPHQIHLGELHAILRRQEDFYPFLKDNREKIEKILTFRIPYYVGPLARGNSRFAWMTRKSEETITPWNFEEVVDKGASAQSFIERMTNFDKNLPNEKVLPKHSLLYEYFTVYNELTKVKYVTEGMRKPAFLSGEQKKAIVDLLFKTNRKVTVKQLKEDYFKKIECFDSVEISGVEDRFNASLGTYHDLLKIIKDKDFLDNEENEDILEDIVLTLTLFEDREMIEERLKTYAHLFDDKVMKQLKRRRYTGWGRLSRKLINGIRDKQSGKTILDFLKSDGFANRNFMQLIHDDSLTFKEDIQKAQVSGQGDSLHEHIANLAGSPAIKKGILQTVKVVDELVKVMGRHKPENIVIEMARENQTTQKGQKNSRERMKRIEEGIKELGSQILKEHPVENTQLQNEKLYLYYLQNGRDMYVDQELDINRLSDYDVDHIVPQSFLKDDSIDNKVLTRSDKNRGKSDNVPSEEVVKKMKNYWRQLLNAKLITQRKFDNLTKAERGGLSELDKAGFIKRQLVETRQITKHVAQILDSRMNTKYDENDKLIREVKVITLKSKLVSDFRKDFQFYKVREINNYHHAHDAYLNAVVGTALIKKYPKLESEFVYGDYKVYDVRKMIAKSEQEIGKATAKYFFYSNIMNFFKTEITLANGEIRKRPLIETNGETGEIVWDKGRDFATVRKVLSMPQVNIVKKTEVQTGGFSKESILPKRNSDKLIARKKDWDPKKYGGFVSPTVAYSVLVVAKVEKGKSKKLKSVKELLGITIMERSSFEKNPIDFLEAKGYKEVKKDLIIKLPKYSLFELENGRKRMLASARELQKGNELALPSKYVNFLYLASHYEKLKGSPEDNEQKQLFVEQHKHYLDEIIEQISEFSKRVILADANLDKVLSAYNKHRDKPIREQAENIIHLFTLTNLGAPAAFKYFDTTIDRKQYRSTKEVLDATLIHQSITGLYETRIDLSQLGGDEGADKRTADGSEFESPKKKRKV

SEQ ID NO: 274 - protein, 1588 aa, Artificial Sequence
  Description of Artificial Sequence: Synthetic polypeptide
MSEVEFSHEYWMRHALTLAKRARDEREVPVGAVLVLNNRVIGEGWNRAIGLHDPTAHAEIMALRQGGLVMQNYRLIDATLYVTFEPCVMCAGAMIHSRIGRVVFGVRNAKTGAAGSLMDVLHYPGMNHRVEITEGILADECAALLCTFFRMPRRVFNAQKKAQSSTDSGGSSGGSSGSETPGTSESATPESSGGSSGGSDKKYSIGLAIGTNSVGWAVITDEYKVPSKKFKVLGNTDRHSIKKNLIGALLFDSGETAEATRLKRTARRRYTRRKNRICYLQEIFSNEMAKVDDSFFHRLEESFLVEEDKKHERHPIFGNIVDEVAYHEKYPTIYHLRKKLVDSTDKADLRLIYLALAHMIKFRGHFLIEGDLNPDNSDVDKLFIQLVQTYNQLFEENPINASGVDAKAILSARLSKSRRLENLIAQLPGEKKNGLFGNLIALSLGLTPNFKSNFDLAEDAKLQLSKDTYDDDLDNLLAQIGDQYADLFLAAKNLSDAILLSDILRVNTEITKAPLSASMIKRYDEHHQDLTLLKALVRQQLPEKYKEIFFDQSKNGYAGYIDGGASQEEFYKFIKPILEKMDGTEELLVKLNREDLLRKQRTFDNGSIPHQIHLGELHAILRRQEDFYPFLKDNREKIEKILTFRIPYYVGPLARGNSRFAWMTRKSEETITPWNFEEVVDKGASAQSFIERMTNFDKNLPNEKVLPKHSLLYEYFTVYNELTKVKYVTEGMRKPAFLSGEQKKAIVDLLFKTNRKVTVKQLKEDYFKKIECFDSVEISGVEDRFNASLGTYHDLLKIIKDKDFLDNEENEDILEDIVLTLTLFEDREMIEERLKTYAHLFDDKVMKQLKRRRYTGWGRLSRKLINGIRDKQSGKTILDFLKSDGFANRNFMQLIHDDSLTFKEDIQKAQVSGQGDSLHEHIANLAGSPAIKKGILQTVKVVDELVKVMGRHKPENIVIEMARENQTTQKGQKNSRERMKRIEEGIKELGSQILKEHPVENTQLQNEKLYLYYLQNGRDMYVDQELDINRLSDYDVDHIVPQSFLKDDSIDNKVLTRSDKNRGKSDNVPSEEVVKKMKNYWRQLLNAKLITQRKFDNLTKAERGGLSELDKAGFIKRQLVETRQITKHVAQILDSRMNTKYDENDKLIREVKVITLKSKLVSDFRKDFQFYKVREINNYHHAHDAYLNAVVGTALIKKYPKLESEFVYGDYKVYDVRKMIAKSEQEIGKATAKYFFYSNIMNFFKTEITLANGEIRKRPLIETNGETGEIVWDKGRDFATVRKVLSMPQVNIVKKTEVQTGGFSKESILPKRNSDKLIARKKDWDPKKYGGFVSPTVAYSVLVVAKVEKGKSKKLKSVKELLGITIMERSSFEKNPIDFLEAKGYKEVKKDLIIKLPKYSLFELENGRKRMLASARELQKGNELALPSKYVNFLYLASHYEKLKGSPEDNEQKQLFVEQHKHYLDEIIEQISEFSKRVILADANLDKVLSAYNKHRDKPIREQAENIIHLFTLTNLGAPAAFKYFDTTIDRKQYRSTKEVLDATLIHQSITGLYETRIDLSQLGGDEGADKRTADGSEFESPKKKRKV

SEQ ID NO: 275 - protein, 1588 aa, Artificial Sequence
  Description of Artificial Sequence: Synthetic polypeptide
MSEVEFSHEYWMRHALTLAKRARDEREVPVGAVLVLNNRVIGEGWNRAIGLHDPTAHAEIMALRQGGLVMQNYRLIDATLYVTFEPCVMCAGAMIHSRIGRVVFGVRNAKTGAAGSLMDVLHYPGMNHRVEITEGILADECAALLCTFFRMPRSVFNAQKKAQSSTDSGGSSGGSSGSETPGTSESATPESSGGSSGGSDKKYSIGLAIGTNSVGWAVITDEYKVPSKKFKVLGNTDRHSIKKNLIGALLFDSGETAEATRLKRTARRRYTRRKNRICYLQEIFSNEMAKVDDSFFHRLEESFLVEEDKKHERHPIFGNIVDEVAYHEKYPTIYHLRKKLVDSTDKADLRLIYLALAHMIKFRGHFLIEGDLNPDNSDVDKLFIQLVQTYNQLFEENPINASGVDAKAILSARLSKSRRLENLIAQLPGEKKNGLFGNLIALSLGLTPNFKSNFDLAEDAKLQLSKDTYDDDLDNLLAQIGDQYADLFLAAKNLSDAILLSDILRVNTEITKAPLSASMIKRYDEHHQDLTLLKALVRQQLPEKYKEIFFDQSKNGYAGYIDGGASQEEFYKFIKPILEKMDGTEELLVKLNREDLLRKQRTFDNGSIPHQIHLGELHAILRRQEDFYPFLKDNREKIEKILTFRIPYYVGPLARGNSRFAWMTRKSEETITPWNFEEVVDKGASAQSFIERMTNFDKNLPNEKVLPKHSLLYEYFTVYNELTKVKYVTEGMRKPAFLSGEQKKAIVDLLFKTNRKVTVKQLKEDYFKKIECFDSVEISGVEDRFNASLGTYHDLLKIIKDKDFLDNEENEDILEDIVLTLTLFEDREMIEERLKTYAHLFDDKVMKQLKRRRYTGWGRLSRKLINGIRDKQSGKTILDFLKSDGFANRNFMQLIHDDSLTFKEDIQKAQVSGQGDSLHEHIANLAGSPAIKKGILQTVKVVDELVKVMGRHKPENIVIEMARENQTTQKGQKNSRERMKRIEEGIKELGSQILKEHPVENTQLQNEKLYLYYLQNGRDMYVDQELDINRLSDYDVDHIVPQSFLKDDSIDNKVLTRSDKNRGKSDNVPSEEVVKKMKNYWRQLLNAKLITQRKFDNLTKAERGGLSELDKAGFIKRQLVETRQITKHVAQILDSRMNTKYDENDKLIREVKVITLKSKLVSDFRKDFQFYKVREINNYHHAHDAYLNAVVGTALIKKYPKLESEFVYGDYKVYDVRKMIAKSEQEIGKATAKYFFYSNIMNFFKTEITLANGEIRKRPLIETNGETGEIVWDKGRDFATVRKVLSMPQVNIVKKTEVQTGGFSKESILPKRNSDKLIARKKDWDPKKYGGFVSPTVAYSVLVVAKVEKGKSKKLKSVKELLGITIMERSSFEKNPIDFLEAKGYKEVKKDLIIKLPKYSLFELENGRKRMLASARELQKGNELALPSKYVNFLYLASHYEKLKGSPEDNEQKQLFVEQHKHYLDEIIEQISEFSKRVILADANLDKVLSAYNKHRDKPIREQAENIIHLFTLTNLGAPAAFKYFDTTIDRKQYRSTKEVLDATLIHQSITGLYETRIDLSQLGGDEGADKRTADGSEFESPKKKRKV

SEQ ID NO: 276 - protein, 1588 aa, Artificial Sequence
  Description of Artificial Sequence: Synthetic polypeptide
MSEVEFSHEYWMRHALTLAKRARDEREVPVGAVLVLNNRVIGEGWNRAIGLHDPTAHAEIMALRQGGLVMQNYRLYDATLYVTFEPCVMCAGAMIHSRIGRVVFGVRNAKTGAAGSLMDVLHHPGMNHRVEITEGILADECAALLCRFFRMPRRVFNAQKKAQSSTDSGGSSGGSSGSETPGTSESATPESSGGSSGGSDKKYSIGLAIGTNSVGWAVITDEYKVPSKKFKVLGNTDRHSIKKNLIGALLFDSGETAEATRLKRTARRRYTRRKNRICYLQEIFSNEMAKVDDSFFHRLEESFLVEEDKKHERHPIFGNIVDEVAYHEKYPTIYHLRKKLVDSTDKADLRLIYLALAHMIKFRGHFLIEGDLNPDNSDVDKLFIQLVQTYNQLFEENPINASGVDAKAILSARLSKSRRLENLIAQLPGEKKNGLFGNLIALSLGLTPNFKSNFDLAEDAKLQLSKDTYDDDLDNLLAQIGDQYADLFLAAKNLSDAILLSDILRVNTEITKAPLSASMIKRYDEHHQDLTLLKALVRQQLPEKYKEIFFDQSKNGYAGYIDGGASQEEFYKFIKPILEKMDGTEELLVKLNREDLLRKQRTFDNGSIPHQIHLGELHAILRRQEDFYPFLKDNREKIEKILTFRIPYYVGPLARGNSRFAWMTRKSEETITPWNFEEVVDKGASAQSFIERMTNFDKNLPNEKVLPKHSLLYEYFTVYNELTKVKYVTEGMRKPAFLSGEQKKAIVDLLFKTNRKVTVKQLKEDYFKKIECFDSVEISGVEDRFNASLGTYHDLLKIIKDKDFLDNEENEDILEDIVLTLTLFEDREMIEERLKTYAHLFDDKVMKQLKRRRYTGWGRLSRKLINGIRDKQSGKTILDFLKSDGFANRNFMQLIHDDSLTFKEDIQKAQVSGQGDSLHEHIANLAGSPAIKKGILQTVKVVDELVKVMGRHKPENIVIEMARENQTTQKGQKNSRERMKRIEEGIKELGSQILKEHPVENTQLQNEKLYLYYLQNGRDMYVDQELDINRLSDYDVDHIVPQSFLKDDSIDNKVLTRSDKNRGKSDNVPSEEVVKKMKNYWRQLLNAKLITQRKFDNLTKAERGGLSELDKAGFIKRQLVETRQITKHVAQILDSRMNTKYDENDKLIREVKVITLKSKLVSDFRKDFQFYKVREINNYHHAHDAYLNAVVGTALIKKYPKLESEFVYGDYKVYDVRKMIAKSEQEIGKATAKYFFYSNIMNFFKTEITLANGEIRKRPLIETNGETGEIVWDKGRDFATVRKVLSMPQVNIVKKTEVQTGGFSKESILPKRNSDKLIARKKDWDPKKYGGFVSPTVAYSVLVVAKVEKGKSKKLKSVKELLGITIMERSSFEKNPIDFLEAKGYKEVKKDLIIKLPKYSLFELENGRKRMLASARELQKGNELALPSKYVNFLYLASHYEKLKGSPEDNEQKQLFVEQHKHYLDEIIEQISEFSKRVILADANLDKVLSAYNKHRDKPIREQAENIIHLFTLTNLGAPAAFKYFDTTIDRKQYRSTKEVLDATLIHQSITGLYETRIDLSQLGGDEGADKRTADGSEFESPKKKRKV

SEQ ID NO: 277 - protein, 1588 aa, Artificial Sequence
  Description of Artificial Sequence: Synthetic polypeptide
MSEVEFSHEYWMRHALTLAKRARDEREVPVGAVLVLNNRVIGEGWNRAIGLHDPTAHAEIMALRQGGLVMQNYRLIDATLYSTFEPCVMCAGAMIHSRIGRVVFGVRNAKTGAAGSLMDVLHYPGMNHRVEITEGILADECAALLCYFFRMPRRVFNAQKKAQSSTDSGGSSGGSSGSETPGTSESATPESSGGSSGGSDKKYSIGLAIGTNSVGWAVITDEYKVPSKKFKVLGNTDRHSIKKNLIGALLFDSGETAEATRLKRTARRRYTRRKNRICYLQEIFSNEMAKVDDSFFHRLEESFLVEEDKKHERHPIFGNIVDEVAYHEKYPTIYHLRKKLVDSTDKADLRLIYLALAHMIKFRGHFLIEGDLNPDNSDVDKLFIQLVQTYNQLFEENPINASGVDAKAILSARLSKSRRLENLIAQLPGEKKNGLFGNLIALSLGLTPNFKSNFDLAEDAKLQLSKDTYDDDLDNLLAQIGDQYADLFLAAKNLSDAILLSDILRVNTEITKAPLSASMIKRYDEHHQDLTLLKALVRQQLPEKYKEIFFDQSKNGYAGYIDGGASQEEFYKFIKPILEKMDGTEELLVKLNREDLLRKQRTFDNGSIPHQIHLGELHAILRRQEDFYPFLKDNREKIEKILTFRIPYYVGPLARGNSRFAWMTRKSEETITPWNFEEVVDKGASAQSFIERMTNFDKNLPNEKVLPKHSLLYEYFTVYNELTKVKYVTEGMRKPAFLSGEQKKAIVDLLFKTNRKVTVKQLKEDYFKKIECFDSVEISGVEDRFNASLGTYHDLLKIIKDKDFLDNEENEDILEDIVLTLTLFEDREMIEERLKTYAHLFDDKVMKQLKRRRYTGWGRLSRKLINGIRDKQSGKTILDFLKSDGFANRNFMQLIHDDSLTFKEDIQKAQVSGQGDSLHEHIANLAGSPAIKKGILQTVKVVDELVKVMGRHKPENIVIEMARENQTTQKGQKNSRERMKRIEEGIKELGSQILKEHPVENTQLQNEKLYLYYLQNGRDMYVDQELDINRLSDYDVDHIVPQSFLKDDSIDNKVLTRSDKNRGKSDNVPSEEVVKKMKNYWRQLLNAKLITQRKFDNLTKAERGGLSELDKAGFIKRQLVETRQITKHVAQILDSRMNTKYDENDKLIREVKVITLKSKLVSDFRKDFQFYKVREINNYHHAHDAYLNAVVGTALIKKYPKLESEFVYGDYKVYDVRKMIAKSEQEIGKATAKYFFYSNIMNFFKTEITLANGEIRKRPLIETNGETGEIVWDKGRDFATVRKVLSMPQVNIVKKTEVQTGGFSKESILPKRNSDKLIARKKDWDPKKYGGFVSPTVAYSVLVVAKVEKGKSKKLKSVKELLGITIMERSSFEKNPIDFLEAKGYKEVKKDLIIKLPKYSLFELENGRKRMLASARELQKGNELALPSKYVNFLYLASHYEKLKGSPEDNEQKQLFVEQHKHYLDEIIEQISEFSKRVILADANLDKVLSAYNKHRDKPIREQAENIIHLFTLTNLGAPAAFKYFDTTIDRKQYRSTKEVLDATLIHQSITGLYETRIDLSQLGGDEGADKRTADGSEFESPKKKRKV

SEQ ID NO: 278 - protein, 4 aa, Artificial Sequence
  Description of Artificial Sequence: Synthetic peptide
SGGS

SEQ ID NO: 279 - protein, 4 aa, Artificial Sequence
  Description of Artificial Sequence: Synthetic peptide
GGGS

SEQ ID NO: 280 - protein, 5 aa, Artificial Sequence
  Description of Artificial Sequence: Synthetic peptide
GGGGS

SEQ ID NO: 281 - protein, 5 aa, Artificial Sequence
  Description of Artificial Sequence: Synthetic peptide
EAAAK

SEQ ID NO: 282 - protein, 21 aa, Artificial Sequence
  Description of Artificial Sequence: Synthetic peptide
  MISC_FEATURE (1)..(21): This sequence may encompass 1, 3 or 7 "Gly Gly Ser" repeating units
GGSGGSGGSGGSGGSGGSGGS

SEQ ID NO: 283 - protein, 5 aa, Artificial Sequence
  Description of Artificial Sequence: Synthetic peptide
PAPAP

SEQ ID NO: 284 - protein, 6 aa, Artificial Sequence
  Description of Artificial Sequence: Synthetic peptide
PAPAPA

SEQ ID NO: 285 - protein, 7 aa, Artificial Sequence
  Description of Artificial Sequence: Synthetic peptide
PAPAPAP

SEQ ID NO: 286 - protein, 8 aa, Artificial Sequence
  Description of Artificial Sequence: Synthetic peptide
PAPAPAPA

SEQ ID NO: 287 - protein, 9 aa, Artificial Sequence
  Description of Artificial Sequence: Synthetic peptide
PAPAPAPAP

SEQ ID NO: 288 - protein, 15 aa, Artificial Sequence
  Description of Artificial Sequence: Synthetic peptide
PAPAPAPAPAPAPAP

SEQ ID NO: 289 - protein, 21 aa, Artificial Sequence
  Description of Artificial Sequence: Synthetic peptide
PAPAPAPAPAPAPAPAPAPAP

SEQ ID NO: 290 - RNA, 41 nt, Homo sapiens
uccgacuauaugaaaugccuuauuuuccaaugggauuuugg

SEQ ID NO: 291 - DNA, 31 bp, Homo sapiens
gctgtgtgtcgaagttcgccctggagaggtg

SEQ ID NO: 292 - DNA, 31 bp, Homo sapiens
gctgtgtgtcggagttcgccctggagaggtg

SEQ ID NO: 293 - RNA, 31 nt, Artificial Sequence
  Description of Artificial Sequence: Synthetic oligonucleotide
caccucuccagggcgaacuucgacacacagc

SEQ ID NO: 294 - RNA, 31 nt, Artificial Sequence
  Description of Artificial Sequence: Synthetic oligonucleotide
caccucuccagggcgaacuccgacacacagc

SEQ ID NO: 295 - DNA, 25 bp, Homo sapiens
gctcgcccttcttcttcccctgtga

SEQ ID NO: 296 - DNA, 39 bp, Homo sapiens
gtctttccctccaggctcgcccttcttcttcccctgtga

SEQ ID NO: 297 - DNA, 25 bp, Homo sapiens
tcacaggggaagaagaagggcgagc

SEQ ID NO: 298 - DNA, 39 bp, Homo sapiens
tcacaggggaagaagaagggcgagcctggagggaaagac

SEQ ID NO: 299 - RNA, 25 nt, Artificial Sequence
  Description of Artificial Sequence: Synthetic oligonucleotide
gcucgcccuucuucuuccccuguga

SEQ ID NO: 300 - RNA, 39 nt, Artificial Sequence
  Description of Artificial Sequence: Synthetic oligonucleotide
gucuuucccuccaggcucgcccuucuucuuccccuguga

SEQ ID NO: 301 - RNA, 25 nt, Artificial Sequence
  Description of Artificial Sequence: Synthetic oligonucleotide
ucacaggggaagaagaagggcgagc

SEQ ID NO: 302 - RNA, 39 nt, Artificial Sequence
  Description of Artificial Sequence: Synthetic oligonucleotide
ucacaggggaagaagaagggcgagccuggagggaaagac

SEQ ID NO: 303 - RNA, 41 nt, Artificial Sequence; identical to SEQ ID NO: 290
  Description of Artificial Sequence: Synthetic oligonucleotide

SEQ ID NO: 304 - RNA, 48 nt, Artificial Sequence
  Description of Artificial Sequence: Synthetic oligonucleotide
uugcaaagauugcugacuagggcauugcucaguacugcuguagaaugg

SEQ ID NO: 305 - DNA, 22 bp, Artificial Sequence
  Description of Artificial Sequence: Synthetic oligonucleotide
cttttcacttttcctgccgggg

SEQ ID NO: 306 - DNA, 20 bp, Artificial Sequence
  Description of Artificial Sequence: Synthetic oligonucleotide
agcttccatgtccagccttc

SEQ ID NO: 307 - DNA, 20 bp, Artificial Sequence
  Description of Artificial Sequence: Synthetic oligonucleotide
accatgaagtcaaaatcatt

SEQ ID NO: 308 - DNA, 20 bp, Artificial Sequence
  Description of Artificial Sequence: Synthetic oligonucleotide
gctttcagccccgtttcttg

SEQ ID NO: 309 - DNA, 933 bp, Unknown
  Description of Unknown: inactivated kanamycin resistance gene sequence
ccggaattgccagctggggcgccctctggtaaggttgggaagccctgcaaagtaaactggatggctttcttgccgccaaggatctgatggcgcaggggatcaagatctgatcaagagacaggatgaggatcctttcgcatgatcgaataagatggattgcacgcaggttctccggccgcttaggtggagcgcctattcggctatgactgggcacaacagacaatcggctgctctgatgccgccgtgttccggctgtcagcgcaggggcgcccggttctttttgtcaagaccgacctgtccggtgccctgaatgaactgcaggacgaggcagcgcggctatcgtggctggccacgacgggcgttccttgcgcagctgtgctcgacgttgtcactgaagcgggaagggactggctgctattgggcgaagtgccggggcaggatctcctgtcatctcaccttgctcctgccgagaaagtatccatcatggctgatgcaatgcggcggctgcatacgcttgatccggctacctgcccattcgaccaccaagcgaaacatcgcatcgagcgagcacgtactcggatggaagccggtcttgtcgatcaggatgatctggacgaagagcatcaggggctcgcgccagccgaactgttcgccaggctcaaggcgcgcatgcccgacggcgaggatctcgtcgtgacccatggcgatgcctgcttgccgaatatcatggtggaaaatggccgcttttctggattcattaactgtggccggctgggtgtggcggaccgctatcaggacatagcgttggctacccgtgatattgctgaagagcttggcggcgaatgggctgaccgcttcctcgtgctttacggtatcgccgctcccgattcgcagcgcatcgccttctatcgccttcttgacgagttcttctaa

SEQ ID NO: 310 - RNA, 20 nt, Artificial Sequence
  Description of Artificial Sequence: Synthetic oligonucleotide
gaacacaaagcauagacugc

SEQ ID NO: 311 - RNA, 20 nt, Artificial Sequence
  Description of Artificial Sequence: Synthetic oligonucleotide
gggaaagacccagcauccgu

SEQ ID NO: 312 - RNA, 20 nt, Artificial Sequence
  Description of Artificial Sequence: Synthetic oligonucleotide
gcucccaucacaucaaccgg

SEQ ID NO: 313 - RNA, 20 nt, Artificial Sequence
  Description of Artificial Sequence: Synthetic oligonucleotide
ggugagugagugugugcgug

SEQ ID NO: 314 - RNA, 20 nt, Artificial Sequence
  Description of Artificial Sequence: Synthetic oligonucleotide
ggcuucagguucuaaaugag

SEQ ID NO: 315 - RNA, 20 nt, Artificial Sequence
  Description of Artificial Sequence: Synthetic oligonucleotide
gcagagagucgccgucucca

SEQ ID NO: 316 - RNA, 20 nt, Artificial Sequence
  Description of Artificial Sequence: Synthetic oligonucleotide
guguaagaccucaaaagcac

SEQ ID NO: 317 - RNA, 20 nt, Artificial Sequence
  Description of Artificial Sequence: Synthetic oligonucleotide
gaugagaaggagaaguucuu

SEQ ID NO: 318 - RNA, 20 nt, Artificial Sequence
  Description of Artificial Sequence: Synthetic oligonucleotide
gaggacaaaguacaaacggc

SEQ ID NO: 319 - RNA, 20 nt, Artificial Sequence
  Description of Artificial Sequence: Synthetic oligonucleotide
gccaccacagggaagcuggg

SEQ ID NO: 320 - RNA, 20 nt, Artificial Sequence
  Description of Artificial Sequence: Synthetic oligonucleotide
gcucucaggcccuguccgca

SEQ ID NO: 321 - RNA, 20 nt, Artificial Sequence
  Description of Artificial Sequence: Synthetic oligonucleotide
gagcaaauaccagagauaag

SEQ ID NO: 322 - RNA, 20 nt, Artificial Sequence
  Description of Artificial Sequence: Synthetic oligonucleotide
gaucaggaaauagagccaca

SEQ ID NO: 323 - RNA, 20 nt, Artificial Sequence
  Description of Artificial Sequence: Synthetic oligonucleotide
gcccaucccugaguccagcg

SEQ ID NO: 324 - RNA, 23 nt, Artificial Sequence
  Description of Artificial Sequence: Synthetic oligonucleotide
gaacacgaagacaucugaaggua

SEQ ID NO: 325 - RNA, 23 nt, Artificial Sequence
  Description of Artificial Sequence: Synthetic oligonucleotide
gauuuacagccuggccuuugggg

SEQ ID NO: 326 - RNA, 22 nt, Artificial Sequence
  Description of Artificial Sequence: Synthetic oligonucleotide
ggagagaaagagaaguugauug

SEQ ID NO: 327 - RNA, 22 nt, Artificial Sequence
  Description of Artificial Sequence: Synthetic oligonucleotide
gagggugagggaugagauaaug

SEQ ID NO: 328 - RNA, 22 nt, Artificial Sequence
  Description of Artificial Sequence: Synthetic oligonucleotide
gguggaggagggugcauggggu

SEQ ID NO: 329 - RNA, 22 nt, Artificial Sequence
  Description of Artificial Sequence: Synthetic oligonucleotide
gcuguugcaugaggaaagggac

SEQ ID NO: 330 - RNA, 20 nt, Artificial Sequence
  Description of Artificial Sequence: Synthetic oligonucleotide
ggcccagacugagcacguga

SEQ ID NO: 331 - RNA, 20 nt, Artificial Sequence
  Description of Artificial Sequence: Synthetic oligonucleotide
ggcacugcggcuggaggugg

SEQ ID NO: 332 - RNA, 21 nt, Artificial Sequence
  Description of Artificial Sequence: Synthetic oligonucleotide
gcagagcacuggaauucguca

SEQ ID NO: 333 - RNA, 76 nt, Artificial Sequence
  Description of Artificial Sequence: Synthetic oligonucleotide
guuuuagagcuagaaauagcaaguuaaaauaaggcuaguccguuaucaacuugaaaaaguggcaccgagucggugc

SEQ ID NO: 334 - RNA, 84 nt, Artificial Sequence
  Description of Artificial Sequence: Synthetic oligonucleotide
guuuuaguacucuguaaugaaaauuacagaaucuacuaaaacaaggcaaaaugccguguuuaucucgucaacuuguuggcgaga

SEQ ID NO: 335 - DNA, 57 bp, Artificial Sequence
  Description of Artificial Sequence: Synthetic primer
  modified_base (34)..(37): a, c, t, g, unknown or other
acactctttccctacacgacgctcttccgatctnnnnccagccccatctgtcaaact

SEQ ID NO: 336 - DNA, 54 bp, Artificial Sequence
  Description of Artificial Sequence: Synthetic primer
tggagttcagacgtgtgctcttccgatcttgaatggattccttggaaacaatga

SEQ ID NO: 337 - DNA, 57 bp, Artificial Sequence
  Description of Artificial Sequence: Synthetic primer
  modified_base (34)..(37): a, c, t, g, unknown or other
acactctttccctacacgacgctcttccgatctnnnntgagggagagccgtgtagtt

SEQ ID NO: 338 - DNA, 49 bp, Artificial Sequence
  Description of Artificial Sequence: Synthetic primer
tggagttcagacgtgtgctcttccgatctgcctctcaaagtgctgggat

SEQ ID NO: 339 - DNA, 57 bp, Artificial Sequence
  Description of Artificial Sequence: Synthetic primer
  modified_base (34)..(37): a, c, t, g, unknown or other
acactctttccctacacgacgctcttccgatctnnnnccatcaggctctcagctcag

SEQ ID NO: 340 - DNA, 48 bp, Artificial Sequence
  Description of Artificial Sequence: Synthetic primer
tggagttcagacgtgtgctcttccgatctctcgtgggtttgtggttgc

SEQ ID NO: 341 - DNA, 57 bp, Artificial Sequence
  Description of Artificial Sequence: Synthetic primer
  modified_base (34)..(37): a, c, t, g, unknown or other
acactctttccctacacgacgctcttccgatctnnnngcccattccctctttagcca

SEQ ID NO: 342 - DNA, 49 bp, Artificial Sequence
  Description of Artificial Sequence: Synthetic primer
tggagttcagacgtgtgctcttccgatctgagccgttccctctttgcta

SEQ ID NO: 343 - DNA, 57 bp, Artificial Sequence
  Description of Artificial Sequence: Synthetic primer
  modified_base (34)..(37): a, c, t, g, unknown or other
acactctttccctacacgacgctcttccgatctnnnnaacctgtgtgacacttggca

SEQ ID NO: 344 - DNA, 49 bp, Artificial Sequence
  Description of Artificial Sequence: Synthetic primer
tggagttcagacgtgtgctcttccgatctgtctggcccaagatcacaca

SEQ ID NO: 345 - DNA, 56 bp, Artificial Sequence
  Description of Artificial Sequence: Synthetic primer
  modified_base (34)..(36): a, c, t, g, unknown or other
acactctttccctacacgacgctcttccgatctnnncacggataaagacgctggga

SEQ ID NO: 346 - DNA, 47 bp, Artificial Sequence
  Description of Artificial Sequence: Synthetic primer
tggagttcagacgtgtgctcttccgatctggggtcccaggtgctgac

SEQ ID NO: 347 - DNA, 56 bp, Artificial Sequence
  Description of Artificial Sequence: Synthetic primer
  modified_base (34)..(36): a, c, t, g, unknown or other
acactctttccctacacgacgctcttccgatctnnnttgattgtctcctttgccgc

SEQ ID NO: 348 - DNA, 53 bp, Artificial Sequence
  Description of Artificial Sequence: Synthetic primer
tggagttcagacgtgtgctcttccgatcttgacccagtgtttgatagatcagt

SEQ ID NO: 349 - DNA, 56 bp, Artificial Sequence
  Description of Artificial Sequence: Synthetic primer
  modified_base (34)..(36): a, c, t, g, unknown or other
acactctttccctacacgacgctcttccgatctnnncaccccttcagtccatgctt

SEQ ID NO: 350 - DNA, 49 bp, Artificial Sequence
  Description of Artificial Sequence: Synthetic primer
tggagttcagacgtgtgctcttccgatcttctgatggggaggaacgagt

SEQ ID NO: 351 - DNA, 57 bp, Artificial Sequence
  Description of Artificial Sequence: Synthetic primer
  modified_base (34)..(37): a, c, t, g, unknown or other
acactctttccctacacgacgctcttccgatctnnnncagctcagcctgagtgttga

SEQ ID NO: 352 - DNA, 49 bp, Artificial Sequence
  Description of Artificial Sequence: Synthetic primer
tggagttcagacgtgtgctcttccgatctgcccaccctagtcattggag

SEQ ID NO: 353 - DNA, 57 bp, Artificial Sequence
  Description of Artificial Sequence: Synthetic primer
  modified_base (34)..(37): a, c, t, g, unknown or other
acactctttccctacacgacgctcttccgatctnnnngtcagagggacacactgtgg

SEQ ID NO: 354 - DNA, 49 bp, Artificial Sequence
  Description of Artificial Sequence: Synthetic primer
tggagttcagacgtgtgctcttccgatctcacactcactcacccacaca

SEQ ID NO: 355 - DNA, 57 bp, Artificial Sequence
  Description of Artificial Sequence: Synthetic primer
  modified_base (34)..(37): a, c, t, g, unknown or other
acactctttccctacacgacgctcttccgatctnnnntgtgtgggtgagtgagtgtg

SEQ ID NO: 356 - DNA, 49 bp, Artificial Sequence
  Description of Artificial Sequence: Synthetic primer
tggagttcagacgtgtgctcttccgatctcaccaaggttcacagcctga

SEQ ID NO: 357 - DNA, 57 bp, Artificial Sequence
  Description of Artificial Sequence: Synthetic primer
  modified_base (34)..(37): a, c, t, g, unknown or other
acactctttccctacacgacgctcttccgatctnnnnttgtctctgcctgtagctgc

SEQ ID NO: 358 - DNA, 49 bp, Artificial Sequence
  Description of Artificial Sequence: Synthetic primer
tggagttcagacgtgtgctcttccgatctcgctctgggcttcatcttca

SEQ ID NO: 359 - DNA, 57 bp, Artificial Sequence
  Description of Artificial Sequence: Synthetic primer
  modified_base (34)..(37): a, c, t, g, unknown or other
acactctttccctacacgacgctcttccgatctnnnntgggattatgggtgtgagcc

SEQ ID NO: 360 - DNA, 49 bp, Artificial Sequence
  Description of Artificial Sequence: Synthetic primer
tggagttcagacgtgtgctcttccgatcttgccttcctcctctctctcc

SEQ ID NO: 361 - DNA, 57 bp, Artificial Sequence
  Description of Artificial Sequence: Synthetic primer
  modified_base (34)..(37): a, c, t, g, unknown or other
acactctttccctacacgacgctcttccgatctnnnntgcagaccagattcggagaa

SEQ ID NO: 362 - DNA, 49 bp, Artificial Sequence
  Description of Artificial Sequence: Synthetic primer
tggagttcagacgtgtgctcttccgatctgttcagtttccagggggtcc

SEQ ID NO: 363 - DNA, 57 bp, Artificial Sequence
  Description of Artificial Sequence: Synthetic primer
  modified_base (34)..(37): a, c, t, g, unknown or other
acactctttccctacacgacgctcttccgatctnnnntccgcacagccttagttcaa

SEQ ID NO: 364 - DNA, 49 bp, Artificial Sequence
  Description of Artificial Sequence: Synthetic primer
tggagttcagacgtgtgctcttccgatctaacttgaagagacggcagca

SEQ ID NO: 365 - DNA, 57 bp, Artificial Sequence
  Description of Artificial Sequence: Synthetic primer
  modified_base (34)..(37): a, c, t, g, unknown or other
acactctttccctacacgacgctcttccgatctnnnncccccagctacagaaaggtc

SEQ ID NO: 366 - DNA, 49 bp, Artificial Sequence
  Description of Artificial Sequence: Synthetic primer
tggagttcagacgtgtgctcttccgatctatttccaccgcaaaatggcc

SEQ ID NO: 367 - DNA, 57 bp, Artificial Sequence
  Description of Artificial Sequence: Synthetic primer
  modified_base (34)..(37): a, c, t, g, unknown or other
acactctttccctacacgacgctcttccgatctnnnntcacttcagcccaggagtat

SEQ ID NO: 368 - DNA, 51 bp, Artificial Sequence
  Description of Artificial Sequence: Synthetic primer
tggagttcagacgtgtgctcttccgatcttgtgtatggtgagaggtaggga

SEQ ID NO: 369 - DNA, 57 bp, Artificial Sequence
  Description of Artificial Sequence: Synthetic primer
  modified_base (34)..(37): a, c, t, g, unknown or other
acactctttccctacacgacgctcttccgatctnnnngtctgaggtcacacagtggg

SEQ ID NO: 370 - DNA, 49 bp, Artificial Sequence
  Description of Artificial Sequence: Synthetic primer
tggagttcagacgtgtgctcttccgatctctgagagcagggaccacatc

SEQ ID NO: 371 - DNA, 57 bp, Artificial Sequence
  Description of Artificial Sequence: Synthetic primer
  modified_base (34)..(37): a, c, t, g, unknown or other
acactctttccctacacgacgctcttccgatctnnnngggaggtggagagaggatgt

SEQ ID NO: 372 - DNA, 54 bp, Artificial Sequence
  Description of Artificial Sequence: Synthetic primer
tggagttcagacgtgtgctcttccgatctactcttcctgaggtctaggaacccg

SEQ ID NO: 373 - DNA, 57 bp, Artificial Sequence
  Description of Artificial Sequence: Synthetic primer
  modified_base (34)..(37): a, c, t, g, unknown or other
acactctttccctacacgacgctcttccgatctnnnnccctgttcctaaagcccacc

SEQ ID NO: 374 - DNA, 53 bp, Artificial Sequence
  Description of Artificial Sequence: Synthetic primer
tggagttcagacgtgtgctcttccgatctactctctggttctgtttgtggcca

SEQ ID NO: 375 - DNA, 60 bp, Artificial Sequence
  Description of Artificial Sequence: Synthetic primer
  modified_base (34)..(37): a, c, t, g, unknown or other
acactctttccctacacgacgctcttccgatctnnnnatttgatggagttggacatggcc

SEQ ID NO: 376 - DNA, 46 bp, Artificial Sequence
  Description of Artificial Sequence: Synthetic primer
tggagttcagacgtgtgctctccagctacttgttcttgagtgaagg

SEQ ID NO: 377 - DNA, 59 bp, Artificial Sequence
  Description of Artificial Sequence: Synthetic primer
  modified_base (34)..(37): a, c, t, g, unknown or other
acactctttccctacacgacgctcttccgatctnnnntggctttccaaatcagtgggtc

SEQ ID NO: 378 - DNA, 52 bp, Artificial Sequence
  Description of Artificial Sequence: Synthetic primer
tggagttcagacgtgtgctcttccgatctctcataagcttagaccaacaagc

SEQ ID NO: 379 - DNA, 58 bp, Artificial Sequence
  Description of Artificial Sequence: Synthetic primer
  modified_base (34)..(37): a, c, t, g, unknown or other
acactctttccctacacgacgctcttccgatctnnnnctggttgaccaatctgtggtg

SEQ ID NO: 380 - DNA, 41 bp, Artificial Sequence
  Description of Artificial Sequence: Synthetic primer
tggagttcagacgtgtgctctctgcgtctggatcaggtacg

SEQ ID NO: 381 - DNA, 58 bp, Artificial Sequence
  Description of Artificial Sequence: Synthetic primer
  modified_base (34)..(37): a, c, t, g, unknown or other
acactctttccctacacgacgctcttccgatctnnnngtgtggagagtgagtaagcca

SEQ ID NO: 382 - DNA, 50 bp, Artificial Sequence
  Description of Artificial Sequence: Synthetic primer
tggagttcagacgtgtgctcttccgatctacggtaggatgatttcaggca

SEQ ID NO: 383 - DNA, 58 bp, Artificial Sequence
  Description of Artificial Sequence: Synthetic primer
  modified_base (34)..(37): a, c, t, g, unknown or other
acactctttccctacacgacgctcttccgatctnnnncacaaagcagtgtagctcagg

SEQ ID NO: 384 - DNA, 54 bp, Artificial Sequence
  Description of Artificial Sequence: Synthetic primer
tggagttcagacgtgtgctcttccgatcttttttggtactcgagtgttattcag

SEQ ID NO: 385 - DNA, 57 bp, Artificial Sequence
  Description of Artificial Sequence: Synthetic primer
  modified_base (34)..(37): a, c, t, g, unknown or other
acactctttccctacacgacgctcttccgatctnnnntcccctgttgacctggagaa

SEQ ID NO: 386 - DNA, 49 bp, Artificial Sequence
  Description of Artificial Sequence: Synthetic primer
tggagttcagacgtgtgctcttccgatctcactgtacttgccctgacca

SEQ ID NO: 387 - DNA, 57 bp, Artificial Sequence
  Description of Artificial Sequence: Synthetic primer
  modified_base (34)..(37): a, c, t, g, unknown or other
acactctttccctacacgacgctcttccgatctnnnnttggtgttgacagggagcaa

SEQ ID NO: 388 - DNA, 49 bp, Artificial Sequence
  Description of Artificial Sequence: Synthetic primer
tggagttcagacgtgtgctcttccgatctctgagatgtgggcagaaggg

SEQ ID NO: 389 - DNA, 57 bp, Artificial Sequence
  Description of Artificial Sequence: Synthetic primer
  modified_base (34)..(37): a, c, t, g, unknown or other
acactctttccctacacgacgctcttccgatctnnnntgagagggaacagaagggct

SEQ ID NO: 390 - DNA, 49 bp, Artificial Sequence
  Description of Artificial Sequence: Synthetic primer
tggagttcagacgtgtgctcttccgatctgtccaaaggcccaagaacct

SEQ ID NO: 391 - DNA, 58 bp, Artificial Sequence
  Description of Artificial Sequence: Synthetic primer
  modified_base (34)..(37): a, c, t, g, unknown or other
acactctttccctacacgacgctcttccgatctnnnntcctagcactttggaaggtcg

SEQ ID NO: 392 - DNA, 51 bp, Artificial Sequence
  Description of Artificial Sequence: Synthetic primer
tggagttcagacgtgtgctcttccgatctgctcatcttaatctgctcagcc

SEQ ID NO: 393 - DNA, 57 bp, Artificial Sequence
  Description of Artificial Sequence: Synthetic primer
  modified_base (34)..(37): a, c, t, g, unknown or other
acactctttccctacacgacgctcttccgatctnnnnaaaggagcagctcttcctgg

SEQ ID NO: 394 - DNA, 49 bp, Artificial Sequence
  Description of Artificial Sequence: Synthetic primer
tggagttcagacgtgtgctcttccgatctgtctgcaccatctcccacaa

SEQ ID NO: 395 - DNA, 57 bp, Artificial Sequence
  Description of Artificial Sequence: Synthetic primer
  modified_base (34)..(37): a, c, t, g, unknown or other
acactctttccctacacgacgctcttccgatctnnnnggcatggcttctgagactca

SEQ ID NO: 396 - DNA, 53 bp, Artificial Sequence
  Description of Artificial Sequence: Synthetic primer
tggagttcagacgtgtgctcttccgatctgtctcccttgcactccctgtcttt

SEQ ID NO: 397 - DNA, 57 bp, Artificial Sequence
  Description of Artificial Sequence: Synthetic primer
  modified_base (34)..(37): a, c, t, g, unknown or other
acactctttccctacacgacgctcttccgatctnnnntttggcaatggaggcattgg

SEQ ID NO: 398 - DNA, 49 bp, Artificial Sequence
  Description of Artificial Sequence: Synthetic primer
tggagttcagacgtgtgctcttccgatctgaagaggctgcccatgagag

SEQ ID NO: 399 - DNA, 57 bp, Artificial Sequence
  Description of Artificial Sequence: Synthetic primer
  modified_base (34)..(37): a, c, t, g, unknown or other
acactctttccctacacgacgctcttccgatctnnnnggtctgaggctcgaatcctg

SEQ ID NO: 400 - DNA, 49 bp, Artificial Sequence
  Description of Artificial Sequence: Synthetic primer
tggagttcagacgtgtgctcttccgatctctgtggcctccatatccctg

SEQ ID NO: 401 - DNA, 57 bp, Artificial Sequence
  Description of Artificial Sequence: Synthetic primer
  modified_base (34)..(37): a, c, t, g, unknown or other
acactctttccctacacgacgctcttccgatctnnnntttccaccagaactcagccc

SEQ ID NO: 402 - DNA, 49 bp, Artificial Sequence
  Description of Artificial Sequence: Synthetic primer
tggagttcagacgtgtgctcttccgatctcctcggttcctccacaacac

SEQ ID NO: 403 - DNA, 57 bp, Artificial Sequence
  Description of Artificial Sequence: Synthetic primer
  modified_base (34)..(37): a, c, t, g, unknown or other
acactctttccctacacgacgctcttccgatctnnnncacgggaaggacaggagaag

SEQ ID NO: 404 - DNA, 49 bp, Artificial Sequence
  Description of Artificial Sequence: Synthetic primer
tggagttcagacgtgtgctcttccgatctgcaggggagggataaagcag

SEQ ID NO: 405 - DNA, 59 bp, Artificial Sequence
  Description of Artificial Sequence: Synthetic primer
  modified_base (34)..(37): a, c, t, g, unknown or other
acactctttccctacacgacgctcttccgatctnnnnggaaacgcccatgcaattagtc

SEQ ID NO: 406 - DNA, 51 bp, Artificial Sequence
  Description of Artificial Sequence: Synthetic primer
tggagttcagacgtgtgctcttccgatctcttgtcaaccagtatcccggtg

SEQ ID NO: 407 - DNA, 61 bp, Artificial Sequence
  Description of Artificial Sequence: Synthetic primer
  modified_base (34)..(37): a, c, t, g, unknown or other
acactctttccctacacgacgctcttccgatctnnnntgaatggattccttggaaacaatg

SEQ ID NO: 408 - DNA, 49 bp, Artificial Sequence
  Description of Artificial Sequence: Synthetic primer
tggagttcagacgtgtgctcttccgatctccagccccatctgtcaaact

SEQ ID NO: 409 - DNA, 49 bp, Artificial Sequence
  Description of Artificial Sequence: Synthetic primer
tggagttcagacgtgtgctcttccgatcttcctttcaacccgaacggag

SEQ ID NO: 410 - DNA, 57 bp, Artificial Sequence
  Description of Artificial Sequence: Synthetic primer
  modified_base (34)..(37): a, c, t, g, unknown or other
acactctttccctacacgacgctcttccgatctnnnngctggtcttctttcccctcc

SEQ ID NO: 411 - DNA, 59 bp, Artificial Sequence
  Description of Artificial Sequence: Synthetic primer
  modified_base (34)..(37): a, c, t, g, unknown or other
acactctttccctacacgacgctcttccgatctnnnngccctgcttctttttctctggt

SEQ ID NO: 412 - DNA, 51 bp, Artificial Sequence
  Description of Artificial Sequence: Synthetic primer
tggagttcagacgtgtgctcttccgatctaccattaacgcagccaacttca

SEQ ID NO: 413 - DNA, 60 bp, Artificial Sequence
  Description of Artificial Sequence: Synthetic primer
acactctttccctacacgacgctcttccgatctcatgaggtctatggacttcaagagcaa

SEQ ID NO: 414 - DNA, 56 bp, Artificial Sequence
  Description of Artificial Sequence: Synthetic primer
tggagttcagacgtgtgctcttccgatctcatcattgaccagagctctgggcagaa

SEQ ID NO: 415 - DNA, 60 bp, Artificial Sequence
  Description of Artificial Sequence: Synthetic primer
acactctttccctacacgacgctcttccgatctgcacttaccagcattacttcctaaacc

SEQ ID NO: 416 - DNA, 55 bp, Artificial Sequence
  Description of Artificial Sequence: Synthetic primer
tggagttcagacgtgtgctcttccgatctatgggctccacttttcagctctgtaa

SEQ ID NO: 417 - DNA, 57 bp, Artificial Sequence
  Description of Artificial Sequence: Synthetic primer
acactctttccctacacgacgctcttccgatctcagttcaggcacatgtaggaggga

SEQ ID NO: 418 - DNA, 56 bp, Artificial Sequence
  Description of Artificial Sequence: Synthetic primer
tggagttcagacgtgtgctcttccgatctaccgcctgcagctgtcggacactggca

SEQ ID NO: 419 - DNA, 56 bp, Artificial Sequence
  Description of Artificial Sequence: Synthetic primer
acactctttccctacacgacgctcttccgatctaaaagatgagtatgcctgccgtg

SEQ ID NO: 420 - DNA, 56 bp, Artificial Sequence
  Description of Artificial Sequence: Synthetic primer
tggagttcagacgtgtgctcttccgatctcagattgtttatatcagatgggatggg

SEQ ID NO: 421 - DNA, 59 bp, Artificial Sequence
  Description of Artificial Sequence: Synthetic primer
acactctttccctacacgacgctcttccgatctatgcaagtttggtcctgagccctccc

SEQ ID NO: 422 - DNA, 53 bp, Artificial Sequence
  Description of Artificial Sequence: Synthetic primer
tggagttcagacgtgtgctcttccgatctgatgtgggttccctgcgctctgca

SEQ ID NO: 423 - DNA, 57 bp, Artificial Sequence
  Description of Artificial Sequence: Synthetic primer
acactctttccctacacgacgctcttccgatctccagggactgagggtggaaggtcc

SEQ ID NO: 424 - DNA, 52 bp, Artificial Sequence
  Description of Artificial Sequence: Synthetic primer
tggagttcagacgtgtgctcttccgatctacctccgcctgagcagtggagaa

SEQ ID NO: 425 - RNA, 120 nt, Artificial Sequence
  Description of Artificial Sequence: Synthetic polynucleotide
aaaaaaaaaaaaaaaaaaaaaaaaaaaaaaaaaaaaaaaaaaaaaaaaaaaaaaaaaaaaaaaaaaaaaaaaaaaaaaaaaaaaaaaaaaaaaaaaaaaaaaaaaaaaaaaaaaaaaaaa

SEQ ID NO: 426 - DNA, 27 bp, Artificial Sequence
  Description of Artificial Sequence: Synthetic primer
tcgagctcggtacctaatacgactcac

SEQ ID NO: 427 - DNA, 149 bp, Artificial Sequence
  Description of Artificial Sequence: Synthetic primer
ttttttttttttttttttttttttttttttttttttttttttttttttttttttttttttttttttttttttttttttttttttttttttttttttttttttttttttttttttttttttcttcctactcaggctttattcaaagacca

SEQ ID NO: 428 - DNA, 20 bp, Artificial Sequence
  Description of Artificial Sequence: Synthetic oligonucleotide
aagcgcaagcctggagggaa

SEQ ID NO: 429 - DNA, 42 bp, Artificial Sequence
  Description of Artificial Sequence: Synthetic oligonucleotide
gaagcgcaagcctggagggaagttttagagctagaaatagca

SEQ ID NO: 430 - DNA, 20 bp, Artificial Sequence
  Description of Artificial Sequence: Synthetic oligonucleotide
actacagcattgctcagtac

SEQ ID NO: 431 - DNA, 42 bp, Artificial Sequence
  Description of Artificial Sequence: Synthetic oligonucleotide
gactacagcattgctcagtacgttttagagctagaaatagca

SEQ ID NO: 432 - DNA, 22 bp, Artificial Sequence
  Description of Artificial Sequence: Synthetic oligonucleotide
ggtgtttcgtcctttccacaag

SEQ ID NO: 433 - DNA, 282 bp, Mus musculus
ctcccagcgcacacttactgctcgattccaggtcaacaatactcacccaccccacgtgcagttgctgcgaaagccagtactcacagtcatggggctcatggccctgttggatggagaacaactctaggcagaggtctcaaaggctggggctgtgttggacagcaatcatacagtgggtgtcctggccagcacccatcaccctgaaggctccgcagcggcctggagtaccacagtcctcatctacactagtgatgacacccacgcacaccccaaccacagtat

SEQ ID NO: 434 - DNA, 24 bp, Artificial Sequence
  Description of Artificial Sequence: Synthetic oligonucleotide
gactctaggcagaggtctcaaagg

SEQ ID NO: 435 - RNA, 20 nt, Artificial Sequence
  Description of Artificial Sequence: Synthetic oligonucleotide
uugagaccucugccuagagu

SEQ ID NO: 436 - DNA, 83 bp, Artificial Sequence
  Description of Artificial Sequence: Synthetic oligonucleotide
gttttagagctagaaatagcaagttaaaataaggctagtccgttatcaacttgaaaaagtggcaccgagtcggtgcttttttt

SEQ ID NO: 437 - DNA, 23 bp, Artificial Sequence
  Description of Artificial Sequence: Synthetic oligonucleotide
actctaggcagaggtctcaaagg

SEQ ID NO: 438 - DNA, 283 bp, Homo sapiens
ccttcgcgcagcgcacgctcaccgcgcgcttccaggtcaacaacacccgcccgccgcacgtgcagctgttgcgcaagccggtgctcacggccatggggctgctggcgctgctggatgaggagcagctctaggccgaagtgtcgcaggccgggaccgtcctggacagcaaccacacggtgggcgtcctggccagcgcccaccgcccccagggcccggccgacgcctggcgcgccgcggtgctgatctacgcgagcgacgacacccgcgcccaccccaaccgcag

SEQ ID NO: 439 - DNA, 23 bp, Artificial Sequence
  Description of Artificial Sequence: Synthetic oligonucleotide
gctctaggccgaagtgtcgcagg

SEQ ID NO: 440 - DNA, 13 bp, Homo sapiens
ttgaccaatagcc

SEQ ID NO: 441 - DNA, 67 bp, Homo sapiens
tggctaaactccacccatgggttggccagccttgccttgaccaatagccttgacaaggcaaacttga

SEQ ID NO: 442 - protein, 8 aa, Artificial Sequence
  Description of Artificial Sequence: Synthetic peptide
  MOD_RES (5)..(5): Val or Ala
  MOD_RES (8)..(8): Ser or Pro
HLTPXEKX

SEQ ID NO: 443 - DNA, 25 bp, Artificial Sequence
  Description of Artificial Sequence: Synthetic oligonucleotide
gcatctgactcctgtggagaagtct

SEQ ID NO: 444 - DNA, 25 bp, Artificial Sequence
  Description of Artificial Sequence: Synthetic oligonucleotide
agacttctccacaggagtcagatgc

SEQ ID NO: 445 - protein, 8 aa, Artificial Sequence
  Description of Artificial Sequence: Synthetic peptide
HLTPVEKS

SEQ ID NO: 446 - DNA, 20 bp, Artificial Sequence
  Description of Artificial Sequence: Synthetic oligonucleotide
gaacacaaagcatagactgc

SEQ ID NO: 447 - DNA, 20 bp, Artificial Sequence
  Description of Artificial Sequence: Synthetic oligonucleotide
gggaaagacccagcatccgt

SEQ ID NO: 448 - DNA, 20 bp, Artificial Sequence
  Description of Artificial Sequence: Synthetic oligonucleotide
gctcccatcacatcaaccgg

SEQ ID NO: 449 - DNA, 20 bp, Artificial Sequence
  Description of Artificial Sequence: Synthetic oligonucleotide
ggcttcaggttctaaatgag

SEQ ID NO: 450 - DNA, 20 bp, Artificial Sequence
  Description of Artificial Sequence: Synthetic oligonucleotide
gcagagagtcgccgtctcca

SEQ ID NO: 451 - DNA, 20 bp, Artificial Sequence
  Description of Artificial Sequence: Synthetic oligonucleotide
gtgtaagacctcaaaagcac

SEQ ID NO: 452 - DNA, 23 bp, Homo sapiens
gtggggaaggggcccccaagagg

SEQ ID NO: 453 - DNA, 39 bp, Homo sapiens
gtctttccctccaggctcgcgcttcttcttcccctgtga

SEQ ID NO: 454 - protein, 8 aa, Homo sapiens
ARASSSPV

SEQ ID NO: 455 - protein, 13 aa, Homo sapiens
RIYEMPYFPMGFW

SEQ ID NO: 456 - RNA, 48 nt, Homo sapiens
uugcaaagauugcugacuacggcauugcucaguacugcuguagaaugg

SEQ ID NO: 457 - protein, 15 aa, Homo sapiens
AKIADYGIAQYCCRM

SEQ ID NO: 458 - DNA, 64 bp, Homo sapiens
aagagggttttgtgtctttccctccaggcttgcgcttcttcttcccctgtgattctcgttggca

SEQ ID NO: 459 - protein, 21 aa, Homo sapiens
KRVLCLSLQACASSSPVILVG

SEQ ID NO: 460 - DNA, 31 bp, Homo sapiens
ttgctgactacagcattgctcagtactgctg

SEQ ID NO: 461 - protein, 8 aa, Homo sapiens
LQHCSVLL

SEQ ID NO: 462 - RNA, 48 nt, Homo sapiens
aaaggaaguuuuccaggcaucugcgaaugcauugucaacucucuuaga

SEQ ID NO: 463 - protein, 15 aa, Homo sapiens
KEVFQASANALSTLL

SEQ ID NO: 464 - DNA, 48 bp, Homo sapiens
ggtagagaaactggagcagctcattttagaagggtaagaaagagctca

SEQ ID NO: 465 - protein, 10 aa, Homo sapiens
VEKLEQLILE

SEQ ID NO: 466 - DNA, 48 bp, Homo sapiens
gtgactagaaataaaatatcagggatatgctcccccttgagactgaag

SEQ ID NO: 467 - protein, 13 aa, Homo sapiens
NKISGICSPLRLK

SEQ ID NO: 468 - RNA, 46 nt, Homo sapiens
ggcugaccugccuagaaauauuauguugaauaaugaugaguuggaa

SEQ ID NO: 469 - protein, 15 aa, Homo sapiens
ADLPRNIMLNNDELE

SEQ ID NO: 470 - DNA, 39 bp, Homo sapiens
cagatgaggagcagctctaggccgaagtgtcgcaggccg

SEQ ID NO: 471 - protein, 5 aa, Homo sapiens
DEEQL

SEQ ID NO: 472 - protein, 6 aa, Homo sapiens
AEVSQA

SEQ ID NO: 473 - DNA, 20 bp, Artificial Sequence
  Description of Artificial Sequence: Synthetic oligonucleotide
cttttcacttcctgccgggg

SEQ ID NO: 474 - DNA, 19 bp, Artificial Sequence
  Description of Artificial Sequence: Synthetic oligonucleotide
ctctaggccgaagtgtcgc

SEQ ID NO: 475 - protein, 10 aa, Homo sapiens
LCVEVRPGEV

SEQ ID NO: 476 - protein, 10 aa, Homo sapiens
LCVGVRPGEV

1. A method of treating a neurological disorder selected from the group consisting of Hurler syndrome, Parkinson's disease, Rett syndrome and Stargardt disease in a subject, the method comprising: administering to the subject (i) an adenosine base editor or a nucleic acid sequence encoding the adenosine base editor and (ii) a guide polynucleotide or a nucleic acid sequence encoding the guide polynucleotide,
wherein the adenosine base editor comprises a programmable DNA binding domain and an adenosine deaminase domain,
wherein the adenosine deaminase domain comprises a V82S alteration at amino acid position 82 as numbered in SEQ ID NO: 2 or a corresponding position thereof,
and wherein the guide polynucleotide directs the adenosine base editor to effect an A-to-G nucleobase alteration in a target gene or a regulatory element thereof associated with the neurological disorder in the subject, thereby treating the neurological disorder in the subject.

2. The method of claim 1, wherein the target gene is an alpha-L-iduronidase (IDUA) gene and the neurological disease is Hurler syndrome;
wherein the target gene is a leucine-rich repeat kinase-2 (LRRK2) gene and the neurological disease is Parkinson's disease;
wherein the target gene is a methyl CpG binding protein 2 (MECP2) gene and the neurological disease is Rett syndrome; and
wherein the target gene is ATP-binding cassette subfamily member 4 (ABCA4) gene and the neurological disease is Stargardt disease.

3-5. (canceled)

6. The method of claim 2, wherein the IDUA gene or regulatory element thereof comprises a SNP associated with Hurler syndrome;
wherein the leucine-rich repeat kinase-2 (LRRK2) gene or a regulatory element thereof comprises a SNP associated with Parkinson's disease;
wherein the MECP2 gene or a regulatory element thereof comprises a SNP associated with Rett syndrome;
wherein the ABCA4 gene a regulatory element thereof comprises a SNP associated with Stargardt disease.

7. The method of claim 1 wherein the A-to-G nucleobase alteration is at a SNP associated with Hurler syndrome, Parkinson's disease, Rett syndrome, or Stargardt disease.

8. The method of claim 6, wherein the SNP associated with Hurler syndrome results in a W402X or a W401X amino acid mutation in an IDUA polypeptide as numbered in SEQ ID NO: 4, or a variant thereof, encoded by the IDUA gene, wherein X is a stop codon;
wherein the SNP associated with Parkinson Disease results in a A419V, a R1441C, a R1441H, or a G2019S amino acid mutation in a LRRK2 polypeptide as numbered in SEQ ID NO: 3, or a variant thereof, encoded by the LRRK2 gene;
wherein the SNP associated with Rett syndrome results in a R106W or a T158M amino acid mutation in a MECP2 polypeptide as numbered in SEQ ID NO: 5, or a variant thereof, encoded by the MECP2 gene;
wherein the SNP associated with Stargardt disease results in a A1038V or a G1961E amino acid mutation in an ABCA4 polypeptide as numbered in SEQ ID NO: 6, or a variant thereof, encoded by the ABCA4 gene.

9. The method of claim 6, wherein the A-to-G nucleobase alteration changes the SNP associated with Hurler syndrome, Parkinson's disease, Rett syndrome, or Stargardt disease to a wild type nucleobase.

10. The method of claim 6, wherein the A-to-G nucleobase alteration changes the SNP associated with Hurler syndrome, Parkinson's disease, Rett syndrome, or Stargardt disease to a non-wild type nucleobase that results in one or more ameliorated symptoms of Hurler syndrome.

11. The method of claim 6, wherein the A-to-G alteration at the SNP associated with Hurler Syndrome, Parkinson's disease, Rett syndrome, or Stargardt disease changes a stop codon to a tryptophan in an IDUA polypeptide encoded by the IDUA gene.

12-13. (canceled)

14. The method of claim 1, wherein the guide is an sgRNA that comprises a nucleic acid sequence selected from the group consisting of: for Hurler's syndrome 5′-GACUCUAGGCAGAGGUCUCAA-3′ (SEQ ID NO: 7), 5′-ACUCUAGGCAGAGGUCUCAA-3′ (SEQ ID NO: 8), 5′-CUCUAGGCCGAAGUGUCGC-3′ (SEQ ID NO: 9), 5′-GCUCUAGGCCGAAGUGUCGC-3′ (SEQ ID NO: 10);
for Parkinson's disease 5′-AAGCGCAAGCCUGGAGGGAA-3′ (SEQ ID NO: 11); 5′-ACUACAGCAUUGCUCAGUAC-3′ (SEQ ID NO: 12);
for Rett syndrome 5′-CUUUUCACUUCCUGCCGGGG-3′ (SEQ ID NO: 13), 5′-AGCUUCCAUGUCCAGCCUUC-3′ (SEQ ID NO: 14), 5′-ACCAUGAAGUCAAAAUCAUU-3′ (SEQ ID NO: 15), and 5′-GCUUUCAGCCCCGUUUCUUG-3′ (SEQ ID NO: 16);
for Stargardt's disease 5′-CUCCAGGGCGAACUUCGACACACAGC-3′ (SEQ ID NO: 17).

15-23. (canceled)

24. The method of claim 2, wherein the A-to-G nucleobase alteration changes a Cysteine or Histidine to an Arginine in a LRRK2 polypeptide encoded by the LRRK2 gene;
changes a Serine to a Glycine in a LRRK2 polypeptide encoded by the LRRK2 gene; or
replaces the Cysteine (C) or Histidine (H) with an Arginine (R) at position 144 or replaces the Serine with a Glycine (G) at position 2019 of a LRRK2 polypeptide as numbered in SEQ ID NO: 3, or a variant thereof, encoded by the LRRK2 gene.

25-38. (canceled)

39. The method of claim 2, wherein the SNP associated with Rett syndrome results in a R255X or a R270X amino acid mutation in a MECP2 polypeptide encoded by the MECP2 gene, wherein X is a stop codon or wherein the A-to-G nucleobase alteration at the SNP associated with Rett Syndrome changes a stop codon to tryptophan in MECP2 polypeptide.

40-59. (canceled)

60. A method of editing a target gene or regulatory element thereof associated with a neurological disorder selected from the group consisting of Hurler syndrome, Parkinson's disease, Rett syndrome and Stargardt disease, the method comprising contacting the target gene or regulatory element thereof with (i) an adenosine base editor and (ii) a guide polynucleotide, wherein the adenosine base editor comprises a programmable DNA binding domain and an adenosine deaminase domain, wherein the adenosine deaminase domain comprises an amino acid substitution at amino acid position 82 or 166 as numbered in SEQ ID NO: 2 or a corresponding position thereof,
wherein the guide polynucleotide directs the adenosine base editor to effect an A-to-G nucleobase alteration in a target gene or a regulatory element thereof associated with the neurological disorder.

61-63. (canceled)

64. The method of claim 60, wherein a SNP associated with Parkinson Disease results in a A419V, a R1441C, a R1441H, or a G2019S amino acid mutation in a LRRK2 polypeptide as numbered in SEQ ID NO: 3, or a variant thereof, encoded by the LRRK2 gene.

65. The method of claim 60, wherein the A-to-G nucleobase alteration changes the SNP associated with the neurological disorder to a wild type nucleobase.

66. (canceled)

67. The method of claim 60, wherein the A-to-G nucleobase alteration changes a Cysteine or Histidine to an Arginine in a LRRK2 polypeptide encoded by the LRRK2 gene or changes a Serine to a Glycine in a LRRK2 polypeptide encoded by the LRRK2 gene.

68. (canceled)

69. The method of claim 67, wherein the A-to-G alteration replaces the Cysteine (C) or Histidine (H) with an Arginine (R) at position 144 or replaces the Serine with a Glycine (G) at position 2019 of a LRRK2 polypeptide as numbered in SEQ ID NO: 3, or a variant thereof, encoded by the LRRK2 gene.

70. A method of editing a leucine-rich repeat kinase-2 (LRRK2) gene or a regulatory element thereof, the method comprising contacting the LRRK2 gene or regulatory element thereof with (i) an adenosine base editor or a nucleic acid sequence encoding the adenosine base editor and (ii) a guide polynucleotide or a nucleic acid sequence encoding the guide polynucleotide, wherein the adenosine base editor comprises a programmable DNA binding domain and an adenosine deaminase domain, and wherein the guide polynucleotide directs the adenosine base editor to effect an A-to-G nucleobase alteration at a SNP in a LLRK2 gene, wherein the SNP does not encode a G2019S mutation in a LRRK2 polypeptide as numbered in SEQ ID NO: 3, or a variant thereof.

71-75. (canceled)

76. A method of editing an alpha-L-iduronidase (IDUA) gene or a regulatory element thereof, the method comprising contacting the IDUA gene or regulatory element thereof with (i) an adenosine base editor or a nucleic acid sequence encoding the adenosine base editor and (ii) a guide polynucleotide or a nucleic acid sequence encoding the guide polynucleotide, wherein the adenosine base editor comprises a programmable DNA binding domain and an adenosine deaminase domain, wherein the adenosine deaminase domain comprises an amino acid substitution at amino acid position 82 or 166 as numbered in SEQ ID NO: 2 or a corresponding position thereof, and wherein the guide polynucleotide directs the adenosine base editor to effect an A-to-G nucleobase alteration in the IDUA gene or a regulatory element thereof.

77-86. (canceled)

87. A method of editing a methyl CpG binding protein 2 (MECP2) gene or regulatory element thereof, the method comprising administering to the subject (i) an adenosine base editor or a nucleic acid sequence encoding the adenosine base editor and (ii) a guide polynucleotide or a nucleic acid sequence encoding the guide polynucleotide, wherein the adenosine base editor comprises a programmable DNA binding domain and an adenosine deaminase domain, wherein the adenosine deaminase domain comprises an amino acid substitution at amino acid position 82 or 166 as numbered in SEQ ID NO: 2 or a corresponding position thereof, and wherein the guide polynucleotide directs the adenosine base editor to effect an A-to-G nucleobase alteration in the MECP2 gene or a regulatory element thereof.

88-89. (canceled)

90. The method of claim 87, wherein a SNP associated with Rett syndrome results in a R106W or a T158M amino acid mutation in a MECP2 polypeptide as numbered in SEQ ID NO: 5, or a variant thereof, encoded by the MECP2 gene or an R255X or a R270X amino acid mutation in a MECP2 polypeptide encoded by the MECP2 gene, wherein X is a stop codon.

91-98. (canceled)

99. A method of editing an ATP binding cassette subfamily member 4 (ABCA4) gene or regulatory element thereof, the method comprising contacting the ABCA4 gene or regulatory element thereof with (i) an adenosine base editor or a nucleic acid sequence encoding the adenosine base editor and (ii) a guide polynucleotide or a nucleic acid sequence encoding the guide polynucleotide, wherein the adenosine base editor comprises a programmable DNA binding domain and an adenosine deaminase domain,
wherein the adenosine deaminase domain comprises an amino acid substitution at amino acid position 82 or 166 as numbered in SEQ ID NO: 2 or a corresponding position thereof,
and wherein the guide polynucleotide directs the adenosine base editor to effect an A-to-G nucleobase alteration in the ABCA4 gene or a regulatory element thereof.

100-103. (canceled)

104. The method of claim 99, wherein a SNP associated with Stargardt disease results in a A1038V, a G1961E amino acid mutation, or a G1961E amino in an ABCA4 polypeptide as numbered in SEQ ID NO: 6, or a variant thereof, encoded by the ABCA4 gene.

105-110. (canceled)

111. The method of claim 60, wherein the contacting is in a cell.

112-139. (canceled)

140. A cell produced by the method of claim 1.

141. (canceled)

142. A base editor system comprising (i) an adenosine base editor or a nucleic acid sequence encoding the adenosine base editor and (ii) a guide polynucleotide or a nucleic acid sequence encoding the guide polynucleotide, wherein the adenosine base editor comprises a programmable DNA binding domain and an adenosine deaminase domain, wherein the adenosine deaminase domain comprises an amino acid substitution at amino acid position 82 or 166 as numbered in SEQ ID NO: 2 or a corresponding position thereof, and wherein the guide polynucleotide directs the adenosine base editor to effect an A-to-G nucleobase alteration in a target gene selected from the group consisting of LRRK2, IDUA, and ABCA4, or a regulatory element thereof associated with the neurological disorder.

143-207. (canceled)

208. A vector comprising the nucleic acid sequence encoding the adenosine base editor of claim 142, and optionally a guide polynucleotide.

209. A vector comprising the nucleic acid sequence encoding the adenosine base editor and the guide polynucleotide of claim 208.

210. (canceled)

211. A cell comprising the base editor system of claim 142.

212-215. (canceled)

216. A pharmaceutical composition comprising the base editor system of claim 142 and a pharmaceutically acceptable carrier.

217-225. (canceled)
